United States Patent Application Publication US 2009/0215711 A1 - sequence listing, part 4

SEQ ID NO: 364 - DNA, 350878 bp, Homo Sapiens
  misc_feature (1)...(350878): n = A,T,C or G
acaattcataaagtttattctatttgatcttcactctaatttacaaagaaaagcagggaagtctatttctgttttacagaggtgtacagggaggctcacaggggctaagttcacacagtaagccctcgaagctgccagggctgcaaagcccaccctctttccaccgcaccgaactacctcctttcgcctacaaaacgtaggtggggaccactggtgttggaatgacggcccacctcgagtttcaggtgacttccactctgcaattaacttgcaggcagccccagacctgcaatgaacacacgggtgggggagagatatgcacgccagggtcagtgggaaccaacagccgaggggtgagcggggctaggggccccgggccgccggcggggcaaacgcggttcagaaacgcaggccgcgctctggcccgccccctgcagcagcacggcctgctcgccatcgcccggagagcgccgcgggttcccgagtccgggcgcggagggcgcgcgggcacggcggcaggggcgtgctcggaggacgcgcgctgcgctgctcctccaaagggcagctccgggggaaagagggtggcgtcccggggaagcccgcagccgccgccgatgtcgctgggactcggaagtgccgaaagaggggtgttgggaactcgcggcgcgcgtgaacgttgccgtcgccgccgcccgggacagcccggaggttggtaactggtgaccatagggggtcctggggaggttagatgctgaattttctgcgtcagtttactctgttaaaaaaaaaatgcacaaaacgctttccgtttcctacccaagttcccgtgtgcgcgcccgagggcgggacagaggaagttcccggtcgggcgaagaagacaaaagcggcgggggccgcgcgcgcagtgcgcccgggcaaaggcggggatctaggcgccgggacaagtccgcgcacggccctgcccacgtcctctctccttggcttcgtccccagcttccggaactgctgcggggagttgcgaactctggtcctcttggcagtatcggcggtgcgcctgcctgcctgctgtgactccagggactctaaagttagagacttcctttgcgttctatcttcaggactcagttttcttcctctgttctgagtctaaccttcaggtggcaggtctttatgcggaaaaaccctcccgctaatcctcaccagaggtactttacgggtagcattggtgttaagaaatgtgctgctacctgtgtacattgctcttggatcagggttgtagggctagggcatttggcatcctcagaggtttgcattacgtgggagtgagacattgcttctctttctgtttttgttgttgtttgtgtttttgaggcggagtttcgctctggtcgcccaggctggagtgcaatggcacaatctcagctcactgcaacctcagcatcccggtttcaagcgattctccagccttgcctcctgagtagctgggattacaggcatgcgccaccacgcccacctaattttgtatttttagtagagacgagggtctcaccgtgttggccaggctggtctcgaattcctgacctcgggtgatctgcccacctcgacctcccaaagtgctgggattacaggcgtgagccaccgtgcctggcatctcattcattctcagagctaaggacctatttcaatgtgattaagtgctatgggaatgcaaggagaggagagggaaggcttcattgaagaggcggtagttcattgaaggagactttgaggaatgatttttttccccttccattcctcatgttccattttccctgtgatttttctccctcctttctcgttgccagtcagtccctaattgtgattgtttgataaggacagctctgacctgagagattcaattaatgttaatttaaggagactgtgtgcttattaggtgctttagatacattatttctaaaccttacagtaactgggaaagataagtgttgttatctcttttcacagtaggatagagaaagccttggaggggagccaaagccacaaactagtacatgtcagggccgggttttggactcctcttttggatcaacgcctgtgctttatctactgtttactttgccccctccttggaagtaggttagatggatgaacttagggtgaaagtcaattctttggagggagcagccgtttttgtgggtggccagatgttggtgggagctctgtaggtagcatcaggaacttgcgagcatgggccttacctgcaccccctgcttccagctcaggacctggcccagggggaatgttccctaaagcagtggtccccaacctttttggcaccaaggaccggtttcatggacaataagtttttcatggactgggggaagggggatggtgttgggataattcaagcacgttacatttattttatttatttgttttgagacaagagtctcgctgggtcacccaggctggagtgcagtggcacgatactggctcactgcaacctccacctctggggatcaagcaattctcgtgcctcagcctccggagtagcttacaggcatgcgacaccacatctggctaatttttgtatttttagtagagacaggatttcaccatgtcaaccaggctggtctcaaattcctgagctcgaactcctgagctcaagccatcctctccttggcctcccaaagtgctgggattacaggtgtgaatcaccatgccccacctgcattacatttattgtggactttatttctattattattacattgtaatatgaatacaactcaccatagagtagaatcagtgggacccctgagcttgtttttctgcaactaggcagtcccatctgggggggtgtgttggtagacattgacacccaaagtgtgtttgcttatgtccagcctacttcatagtctcattttggttgctgtcactgcagaagaccctgcttcacaaagataggatgttggaaatggaagcaggcttttcggtgcttttgtggcaatttcaggatactttgccttgactttaatccagaatgtatggatatttgaagttgtcttaaacatacttctagggcccggtcatttgctatctcaaacagttggtcctcttctagcatggacaaagtcaattcacctggcttattcacaaatggatctaggatccttcccagttcgggtgtcttttgtagttgggaagtaatgctcaaactcttttgaaagctgagataggtgatcatgcaccagctgggagagagaaggccctggcttagtctctttcaaaatctctgctaatgtttgaaacgtgtcagaaatcccagtgttcacttgtcgccgcaataattccagtttggttttgagtgcagccacttatctgccgacttgaacacagttctcccctgaagggacagatggagttcattgaggaggtaagcaagtaagcaagttttgtaaccccttctatgaaatgtgctgccagtggtgactacttttctagaagaaatctctggagtggccctcataactcaaactccggccagtgatctatctttagaaagccatcccacttctgtgtataaaagatgtgtgtgctctatgtccatctcacagagctgtgtgaacagatgtgagttaagggcatgtactttaatgtggttgataattttaatcacatcctgcaaaatgttcttaagttcaggtgacattttttggctagccaacacttctctatggatgtcacagtgcatagactcacattcagaagtgacctctttggcccgagtagtgaaaccagtcgtagcagtcgctctgcccaagcacatactacccaaaaggaccaattcggtttttctgataggtaatcattcaaagacttgaatagttgtgcagctgtggtgttggttagcaacaaaagtgcaagtgacatatcctcgtgcacctaacatcttcatgtatatcctcctgaaaactgtatcacaaaaaaacaagcattgttgccttgtcaacactggtagactagtcaacccagattgcgtaccgcagtgactcattaatcctctctaccaattgtgcctcaatatccgctgctatttcaattcgcctagtttactcttcaccaatagtaaagggcttcttagctttagcaatacggttagccactaagaatgatactctcattgcagacacatttgatgaaatggtagccttcaataattgcttctgttctttgtgcttatgttttttcttttgaaaaactccgaagccttgtcttttaatgcagggtgcttggtctccatgtggtgaagcagttttgaaggtttcatggcttcattggatagccagtggccacatattacacaaagtgggcttggagaatgtgagtcacctgttgcaatgaacctgtaatttgagtatgactcccggtattttcttttaaatgcagcttgctttttgttggcagtcttacagtcttctgtctcatcattgggtcttcccccttttcaaagaagcttaccagtgatgtttgttttttactcatttcggctagggttagcttgtgggcttaccaaaactgtgactgagacaaatgtgcagtgcaggaaacaggcacacctggaagtggtaaataatgggcgggccatgagtggactaaaataagtgtcggattctgactgaaagcctgcccacagatgcagctgtacgatggaagtacatcaactcacttgccactataaagcctgccaccaggcagcattaagctacttgttacttgacactcactgataggattttgatatgagtctgcaagcaattgatttattatggtctctgtgtagtcaaacctccctcttaatgctaatttgtatttgcagccactccccagtgctagcatcacttgtagtcccaactacttgggaggctgaggaggaaggatcacttgagcccaggaggtcaaggctgcagtgagctatgatcaggccactgcactctagcctgcatgacagagtgagaccctgtctcttaaaaaataataataaaatgaaaaaactaaaaaagctccaaatgtatgagtatatgtacttctttatcaatgcagtaagtaacaaaattcagtgcagtagcaagtaactcctgtaatttcaaagtagtgatgcccatgtaaatggtattttgtagtattttcaaaggctacacagtagtatgaaagtatctgacttttactggtgacattcgtcagagctgcttttactactatgatttttttttttttctgagacagcgtctcactatgtcacacaggatggagtgcagtggcatgatctcggctcactgcaaccttcgcctcccgagttcaagcaattctcatgcctcacccaccccagtagctgggattacagatgttcaccaccgtgcctggctaattttgtagttttagtagagacagggttttgccatgttggccaggctggtcttgaactcctggcttgaagtgatctgcccaccttggcctcccaaagtgctggaattacaggtgtgagccattacatctggctggaactgctcttactactgtgagtcgttgtccacatctataatccaatgaaatgctaattttcagccagaaattcatgaaaataaagatatttgagctcatgtccccctgaattctctctatggacaccttgggagtggagggctggggatcctgggttacatacaaccctacttagtggttgtttttcatctaagtacttgctggccactttagcgtatcatttttttttttttttttttttgagaaagggtcttcctgtgtttcccaggctggatcacagctcactgcagcctcaacttcccaggctcccacctcagcctgctgagcagctggggctactggcatgcaacaccattcctggctaatttttgtatttttagcagagaagggatttcgccatgtcgcccaggctggtctcaaactcctgggctcaagtcgtctgcccacctcagcctcccaaaatggtgggattacaggcatgagccaccacacccagcctgttagtgcattactgatagcagtttccttctccttcagttagttttcccctttttagcccgggttcacagttgtttctgtttgatgaaagcttttgagaggggattgctggattgtttatataatctacctgccctgctccttctgtgggtaatatggttggagaatattcctgaaatagtggatgtatgtcatatagtgtatacaccctacctttttatttttttatttttatttttatttttttttttgcgaatagaaatgaaccttagtggtagatgatgttattagtgtcagggaagaaaaatgaactactatcacatatcccacagacagaagctcttaagatgttatgaacgatttcatggtaatacatttgaaaattcagatgaaattgacaggtttttccaataaaatatattaccaaagacacaaaaactagaaaaaatgagtagtcctatatctaccaaaaacattgaatttgtagttaaaaacctttccatagcaaaattttcaggcccagatggctttactagtgaaacttccaaacatttaagaaaattaaagaggaaccactttccggttgcatttatgaggccagcacaatcttgttactaaaaattgataaggatattacaagaaaattataggccaaatgctcataaagacagacacataagtcttaaatatggtaagtcaaatctagcaatctataaaaaggataataaatcatgaccaagttggatttatttcaggaatgtaaactttggctaacactacgaaagtcaacaaatgcaatttaactccatatatgaagtaaaggagaaaaagtatttgatacaactcagcacccattcatgatgaaaaaaaaaaaaagcctctttgcaagctggagcattgagagaaattagatttaaaataacagagggtaaggtattgctctgcaaatctatagattcgggccaatcccaatcaaaatcccggcaaattttttcttcaaaaataggtgataagcagattggaaatttatttggaaattctagacagtcttaagagcaaaactggaggacctaagctactagatcaatatgtagtcatgtcagtgtggtattgcataaagctacacagattatggaactgagtaaagaatccataaacaggcttatacatctgtggtcttttgatttatgacagaggcaacactgcagggcagtggagagaagatggtcttctcagtaaatgacactgggtcgattgactatccacatagacaaaatgaatctagatcatgtacctcatctcatatacaaaaattaatcaagataacaacatacacctaaatgtgaacgctaaaacaaagcacctggaagaaagcaaagtaaaatatctttatgacctagggacaaggtttcttgaataggccacaaaaagcactaattggtacagtgataagaatgaacaaattattgcctcacataacaacatggatgaatcttgtgacacaaagctgagcaaaaccaagatagatgtaaaagagtaaatgcaatgtgattccattgatgtaaagttcaaaaccagacaactaaataaaccatggtggtagaagttaggctagtggtcatctttgatggagttagtgactaggaaagggcagaaggggcttctgaggcattcttttgttttttggagacaggatctcgctctgtcacccaggcgggagtgcagtggtgtgatctcagctcactgcaacctccctgacctgggctcaagcgatcctgtcactgcagcccacctgagtagctgggactacaggcatgcaccactgtgcctggctaatttttttttttttttttttttttagagacagggtcttaccatgttgcccaggctggtcttgaacccctaggctcaagtagtctacccatctcctcctctcaaagtgctagaattacagatgtgagccactgcctctggcctggcgtgcagtttttatctcagtgacaattacttggtaattacataaggctttccacttcttgaaagccctaagggctgggcatgatggctcattcctgtaatcccagcactttgggaggctgaggagggaggatcacttgaggccaggagtttgagatcagcctggccaacatagcaagatcctgtctctaaacaagactaaaaaattagcagggggtggtgatgcgagcctgcaatcccagctactcctgaagctaaggcaggaggatctcttgagcccaggaatttgaggctgcaatgagctatgatcatgccatgcactgtagtctgggtgacagagtgagaccctgtttaagaaaaaaataaaaaataagaaaaaggaagccttaaggttttttcttcatttaagtgtattgtaataaagtttacttaaaatcttgtaaaaagttaggttcattctgatgctcccaggctggggagtgtaagatgtggtgggcacaagccttgctgattaaaaaggcttaaaataggttgagaattttcaggggaaagaatgcaatatcacatcagtagcttttttttgaattagggacttatataattgactcccttttgccaatctttaatggcagagatctggcttgagggaatttcatataaaaagacttagagttatgtttgattataagattgatatcagtgtggggggaaattagaaaagctaagggagtattaagtagaaatttttgttttcagatttaattttcttccaatttaagttttgaaagtttatgaccactggattaaaaaacttttcttccaatttaagttttaaaagtttatgaccattggattaaaaaacaatctgttttctataaatcctttcagttaggtactttcctcccataaggccatgaactaactgagggcagggatggcatatgagtttcctattaaacctgaactaaattaacacaaattcagtggcttcaaaaaacacacatttattaccttatggttctggatgtcagaagtccaaaatgggtcagcagggttcatttgttctgaaggttctagggaacaatctttttgttgtcgttgccttttccagcctctagatgactcttagattccttcatccaggagcccctcctccatcttccaagcacaccactctaacctctgcctccatcatcacctcacatttcctctctgtctctgacccttcagcttccctcctgtaaggaaccttgtgattactttgggcccacccagataatccaggctaatctctcaatcagaagatccttaatcatattggcaaaatcccttttgctgtgtaaggcaacatattcacggttccagggatgaggacatggacacttctaggggacccatctttggtggaccccacagaggggatctttctattttgtcttcacaaagagcacacttcctggttgtcagtagaagttcattcgtatttgttgaatgaagacatgggtctaagatattatttgagtgcagtttctgaaagaaaagtgatggtcttgtcctcctctcactgacacaattggagctttgggttcagttttaggtaaatgtactatacagagtcaactgacaggcagaggatctggggacaggcatggtggctcatgtttgtaatcccagcactttgggaggtgtaggtgggaagatcacttgagtccaggagttcaagaccagcctgggcaacatagtgagacccgcccccatttaaaaaaaaaaatgggtgtagtggctcttgtctatagtcccagctactcgggaggctgagatggaaggattgcttgagcctgggaagttgaggctgcagtaagccaagattgtgccactgcattccagcctgaacaacagagagtgagaccttgtttcaaaaaggagcctggaaccaagtcattgaagtaatggttgaaggaatcatagatgttggtctggaagagggtttggatggagtagatggcattaattatctttaaacatttgaacgagtattattggaaagaataaaaaagcctttttaagcatactcaataatagtaatagcattaaaaacaacaaaaataagcatttcagagtttactatgcctaaggcactgttttatcattttataaattcacttaatcctcatatcaatcttctgaggttcgctattactgtgttttacagataaggaaattgaggctcagagaggttgtgcaccttgtcctaggtcacacaaccatgaagcagcaaagctggaattcaatctttggcattctgactccagagccacccctgaaaccatatcacactatgctgtctccatgcctttagttccagaaggtagaagaggactggtggcagaagaaatccacccctgtatttttttagaaatctgtattttttagaaatacggggtagatttcaaggaaaaacacaacaatcagaactgctagccaggcacagtggtgtgcacctgggaggctgaggcaggaggatcacttgagcccaggagttagagctgtttggagctgcaatgagctatgatcacgccactgcattccagcctgggtgacagagtgggaccctgtctcaaaacaaaaacaacaacaaaagcaagaactgcttaggaacagagtttctctgccttgtaatgttactggaaatggtcaagtaggctgttataaaaggaattcccaaactggctggagatgagaccaaaaggcaatagagactccactgattttgaaattctgatttgggaacatattttttttccattacatatataagaaggtagggaacaacctttgtgacattttatgtaataaagatccattgtgaaaggtagcttttcaactaattttccagattttattgattagtaactatttataatatacctggtgtgctagatgtgtgcccacccctttctaaggtacccttgctgctcctcccataaagaagtatggtctgttttctcctccttgaatccgggctggtctttggacttgctttgaccaataatgtgttctgtgaactctggagcctggtccttaagggatgttgcacctcttgcctctgttcttttggaaccctgaaaccccactgctgtgaaaaagccaagtctagcctaccagaggaggagccctggcctgggggagaagggaggtgacttgtgtgagctggcgccaaatgccagacatgtgcatgaggtcatcatggccccctccagccccagtggagttgtgtggtgacagaagtcacatgagtgacctcaggagggacatgaacagaactgtccagactgccatcccacaaaatccttaaaaagaataaatgttcattgttctaaggcatcacatgttgtgatggtttcttatgcagcaatacataactaatacataatatgttggtgcggatgtggaagtagtgggtatatattttaaactattctgtaattagacttttttccccactccagtgcacctcttccagtctatctagtcattcttctgtgttggtgaaacctttctgggtttggagaagtgtttcctcttagtattatgtgggttgaagaataagtctttgtaagactcttaaatggggactgggcacagtggcccacacctgtaattccagcagtttgggaggctgcggcgggaggatcactcgaggccaggagttcaagaccagcctgggcaacatggcaaaacccagtctctactaaaaacacaaaaattagtggggcagcacactccggcctgggggatagagcaagactctgtctcagaaaaaaaaaaaaaaaaaaaaaaaaaagactcaagtggggtttggagagaattgtgatatgggaatctggacttggtggttttcttggagaaaatcatgtaatttagagtctacaaaatgggattcagtttcatgaaaattggaccctggaaaaggcaaaagtctcataccactttttccgaatatgctagaatattgcactactatttcattttctttaaagccgttgtcatttcagtgggcatgtgcttctttcacttttattgcttgtggtttccagagtgctcatttgttcctgaatttagagctatttcaattttactcttatctctgcataactgctgactttcccctcttatttccaaggtaaatcggttaggtttagtttgcctttttcagtaaatcttttaaggaatgtatgtgagttagatatttcatgtgtattttgattacattttattgatttaaatttttttatcagagagtgtctaacgttatgcataacgtttaaaaattctattacatttagaccacttatattctagctttcctaatggattgatttcattatagattttggaaaaaatgagtccagtacactctgtaagaatagtgaggtggctgagggaaggctctggagttagacttactgggtatgaatctaagctttgctgcttaccagctgtgtgatttggggcgggtttacttatcctttctgggccttggtttcctcttgtgttaagtgaggttatcagaagcaccaacctcaaaggtttgttatgaagattaagtgagataatacttgtaaagtgccttttcagcataggaaatctgtaaatagtacttgttatagtacagctattactaaagcataagaaaactcagtagagggaaatcttcatttaggacattaagcagtgagtcagtagaagtgacgatggtgatgctggtatggagggattgttagcttaatgatgagagctgtcttgttaaagttctctggtgcatgtgagtattgggttatagcccatttagtgcttgatatcaagatttaaaagcagaaaaaatttaaaatggaagtgttggaatccattagttgcctgcatcagaagtaaagctaaagtatttttgaaatgatattggaagttgctgggggaaaagcatcttgcagccgttatgtttatgtatgtttcaggctttggcaaggtgtgctgtacttttcttccaagatcaaggaacaggatttctgcctgtatgacagtgggggttgggaattttggttctaatttttgctccattgctggcttctctgtccgtgggtagatcgctgcttcttcctgagcaggattctgattcctgaaagggacctaaaaacttagccctcctgagaggatccgagtagatggcatctttgaaagcaggtggagtgttaaattccaaagtaaatgcaaatgcaagtggctccagtatagaaaaagttctgtgagctgagagattcttgccattttacagctaagattttattctgtggccctcttgagttctataattcccagataaatatattttttgaaatattcaaccttggggtgtttgtacccaatttggaggtggagaaagctccctattcctccagtctgaattccttccctctgattccagggaaaactttgctatgatttcctttaacatctagtattaaatgcacgttctaccgctttgtcctcacttgcctcaaaattctcactcttttcaacaacatttagcttcaagatcctgttgtcttacagctttggagttgctgttttatcttcttcatcttcctcttttttccccctaccagcttctggactattttgatgccaaggacaactcaatttttccccatctgtgtggcttggttccagcactctctccactttcactaagggcctaaatcatcaacctccctgcctcttgggtctaccacagcatcaaggggctgctttgtagagcttcattcaaataattttatgtactggcttgcaagcctgaggtttctgcaggaaataaaatttaaacatgaaatcgtatgttttaagactccttaccacttggctcctgttctcccttccctgaaccatccacactttatcttctttacagttccgaccagtattcccacactggggaagtgttcttagacacatctcaccatcacacatccctacaaccctccttcactattacatatcaatagtgcaatctcatttgtgtagattaatcaggtagactgctacttaaacacaggctgtgtccctatagattggccgttttctatagaaatgatgctgtaagtggtgatgacttttctaggctatctcacagctacccacttagctgataatgttggtgcaggactgactgcatgaaaacagaaaagaaacatcacttacacatttgagtaagaacctccttgatttcagcctgattgctctgcctaaagagggacatgcttgtttagagtatgagaaatggaaacttggtaattttgtgagagagtttttgggaacctctaagggcctggacattttaaaaaggttccagttatattcccaaatatatagttttccttttcttttacattgtgtcataaatcccttaagacatatctactctgatttactttctggctgcacagctgaaataaacagggaaaacaaagtagggaaataattttcctaagataagtgggcgagtgttgaaggccgaaagaatgagggtcgtgatcaactcagtataccactggagactatatgagtaaacagcaaactgtttctcatgaaagcaggttgttggcaaactgacaaactgtgtctgcctcccagaaagaatgctggggggcagtcaccacccaggcacagtgtttcttgtgattaggcaaatctgaagcctgttagcaataacgtgaacctgtgatcaatcaagcagctgaccagtcattacctcctcctccctgctctttctgcccaataaaaacaaagggctgtagaagctcgaggttgctgcctttgctccctagaagcagggagctctcttcttcccctggccccttcctttaaaatagttacgtttaagttttcatttctgccttcgtcctccttccttcagtctcctaatgactgtctcaagtagtaacagtagtgactgtcgtagtgacagtctcaaatagtaaccattgcagtcagctacaggcaagagttgaaaagagagtgtgtgaggaagaaagctctgttaaggaggatgggtgagtgtctgtgtggtggtggtgtttcgaggtggcattcgtgtaatggagaggtgaaaatgaaagtggaaagtactgcctgtcattcccttgggagtagcagagacgtaggtggtgaggaagaggcaccgggctgaaagcctgcgggtggtccccggggatagtttgcttgctgtccagggtggctttggattgggcgtcagaagaggaatgagacattaacgaaatccctggggatgccaacttcctgaaagaggtccagatgcacgtaggatgggcataccccaggaagttcagccagatttctttgattcagggagaaaatcagggtcagggcttaggtaggctcctgatgagtgaaattcactaactagtaactactaatgtttgttgagtgcttattcactgccaggccctgggctaagcattttacatttaaccccttcaacaaccctataagaaaacatctgggaggccgttatctacccgtttccttaaccaataaatgacacagcctgggactctccctgcaccagcccacccctcctccctgaaccccacaggtgggtttggtgccagaatgtatcactgtgctgtcaagtggagactatttggttcaattcctaaattttgggggtgaggggacagctagtttccctgcttagttacctggtgttttgccgctagttactatgtatctctgtgtatttgtctacaaaacatagagcattgttgaaactatgttattgtttcattgaaacaatgttattgtttccttataccactgagtagaagaaaatggagtttctgctggggccactgtctgtggagtttgcacattctcgctatgtctgcaggggttttctctgggtacttggtttcctcccacatcccacagctgtgcccattaggtgaattggtgtgtctaaatggtcccagtgtgtgaatgtaactgagtgtcctattaagtttttctgtgatggcatcaaatgcctgttgatgctcatctgtccaaggcagggggctctgaatctagtcccttttaaaggcctcataaagtggcttagccatcaaccccaaatttggaattcaaattcaacaaaagccagacattcctagaaatccctgcaattgcctcccgttttggggagcctttggggccactgttatctgctttcagtagggtctttaggctccttcagcctgaagtcgaggttccagagactagaccttgaaatagtacaggcacctgtgaaaatctcccctaccaggagatggctttgagggtacagttaatttacaacccagctgagccccagatgttgccagcccgttcacaagatggagcaacaattcaagacgagtcatcggaacaagtcatgccggcatcggaacaagtcatgccggcctgcactgcctcaccccatgccgcaacttgcttccccttcttaaacctttgcactttgcttggaaatttgaagtggttccattaaggcaagagtctagaccgtcttccccatggctagctttggtctgtaataaagtcactttctttctgccatacctctatcttgctaatttgttttgcaagtggtgagcagctgaacctgtgtttggtaacgagtgtgggggagtgagtatgagtgggttctgcgctgggatggcatcctgtccagggctggttcctgctttgcatcctgagctgctggaatgggctcagctaccagagaccctaaattggaacaagtggggtggaaaatgaatgaatgaatacaaattaataaaaatttgtaaagtctatgataatcatacaaatgcatgacaaaaaaaatgtagtatgaaagcgctcagtgagcccaccctaattgtaaatgttttgaactgcatggtggcaggaggtgctccttataatttttgctttgcaaacattttattccttggtttaacccaccaccaccacaactgccatcacttgctgattcaccaaacttgggtaaataatgatcttacctgtgcttattaatctttaagtgtatgtgtatagctcttgtttatttcagtgtttactattagaagtgttttggtctttatttagatgtatgatgtttttgtgaccagaaatatgcagtaggaacttactttttgcttatatcaattagcctattgtaaaattagtagcattatacattgttttgtttaaagttacaatttccaagaccctactggtgatgttcagtaaggactcactgtacaatccagctaagagcagcactaagctgggtgcagtggctcacgcctgtaatcctagcactttgggaggccacggtgggcggatctcctgagcttaggagtttgagaccaacctgggcaacaacaacaataaaaaactagcctggcattgtggtgcatgcctgtaatcccagctactcaggaggctgaggcaggagaattgcttgagcctgggaagttgaggctgcagcgagctgagatcatgccactgcactcctgcttgggcaacagagcaagaccctgtctccaggaagaaaaaaaaaaaaaaagcagcaccaaaatgaaaaattattaaaccgaattttctagttccctgaggattaaatccttaatgcaggaggattgtctcagatagaatgtccctgaaaagcatctaatggcaggccttctaaaactttcattcagtctacaagatcatttgtgttcaaatttcagtcgcccaattaggagatcagctttttgctaatcagattcttcatgaggcaaagaggtcatccgatgtaataccaacatcttttgacaggcgagacattaaattataagccaagaagttaaaattaccttcccactaaagggaagactaccaaattcctgaaaagttccagaaaggagtcttgttattctaaagatgaaagtatttaaaaataaattgtgaatagaaatggataaagctagaagcagttctgaaaaatagtaaggaacttgagaaagtgttgttgaaatactagggcttaggcttgtgttttaaagcatgaatgattgcttctggatctcttaggttgcaggaaaagtccagaccaaactttctgggtgacttttaggtaacgaaatggggcactctgggtgcaagactgcttatttctgaaatcgtggtttatcaaggctgaagtttatttcccttcctgctctgtctcccagtggtctgaagaaaggagtttgtgtgtgcggcagattctaagccaggctctaagtctgagtaactgtacactggcattaatgggattggccatggcagagtggaggggcaggggcctgggtccaaagacttggctttgagccttggctcagttatttacttatttgtttactcacatatttagacgaaaattgtacatatttatggtgtacaatgtgatgtctagctatacattgtgagatgattaaatcaaggtaattaacatacccatcaccttacctgcttatcattttatggtgagaacatttaagatctactcttagcacttttcaagaatataatacattattgttaactataatcaccatgctgtataatagatcctcagaatttattcatcctgtccaacatcttttaaccaacatcttccccacttcccccgccccagcccctggcaaccacttctgtgagtttgactttttttaggtttcacatataagtgagatcatgcagtatttgcttttttgctctggctcagttatttctggctctgtgacctcatcacatttgtcatctataaaatgcctacctcccctgttccacttccacctacttcaccaggctgttgtgaaaacaaaatgagataatgtgtgaattctggggtttggcatgactgtcacatgttagaagtacttggtggggttggtgggaggtgctgcttaaaattttgctcttattttggcatccacaatgagacatacttgagaggtttaaataaagcagtaaaggccataaatgcgtttaaatttagtgaactctttgttacttggaacatttggaatcatttaatttgctgaattttaggacctaactttcctataccttctctattacttagagtatagtcatggctgccatgatggagagatctagaataggagaggcttaaacaacctagaaatgcatttctctttcctgtaacagtctagatctaagtagtctggggcactttggggcttgggggtggtacatggatttggggactgagaggcctctgtcttgtccatgtggctttcacctcttcatccacggaggctgttccaattctgttcaacaggaaagggagggaaagaaagagatggccacagccatgtcccttcactcacacccttttgaatggagctattcaggtgtccacacttagctacagtgtagtgttggtgtccagaggaaattttaattgatgtgtaagaagagagactgaattctgaaaaggggtagtgaggggcggtgggtaacaagcagtgtctgtcacagatgtctgtgattatgtcattaactgccctttaagaaatgtacagatgaggcctggcacagtggcttgtgcctataaacccagctactcaggaggctgaggtgggaggatcacttgaggccaggaaatcaagatcagcctgggaaacatagaccctgtctccaaaaatacataaataaagtgcatagatgcatggcagacagctgattttaagtttttattttattattgcttttagagaggggatctggctatgttgcccaggctggtctcgaactcctggcctcaagtgatcctcccatcttggcctcccaaagtgttaggattacaggcatgagccaccatgcctggcctatagtatgatacttgaaagggacaacaaggatggtgaacctgttgatttagaggtttgtatactgtttgtgcttttcagactttttgaagccatttattattcacagagcacctggtagtcccttcttgctacatcccaggcactgtgctaggggctggtgagtcagagatcatggtccctgctatctgagggtccactccacagaagagacaggcatattatgcaatgggtagagaactgtctgatgtatactctgatgggagactgtgggaactcctaggaaaagacctgacccctttgacaggcaggatgcacatgtgtggtgtatgtgtgcgtgtgtgtgtgtgtgtgtgtgtgtgttggatgcaggatggagtaagttcacagggaggaggaagcttgattggggttatgtctgtatcaccttgaatagtgatgggtctccgggagtgtgaactaactgaattgatgtttagatgctgttctctagtgtcatgttcatggcttaaagttttgtctctgtttctcagaaactctcagcgtaggcatcgggaaccttcgtgccaaggagccatgctgccccgatgggaactggcactttacctacttgcctcactaggcttccacttctattccttctatgaagtttacaaagtctccagaggtaaggccccaagcttttcagacctcctatcaaacaaggaaactcctgtcaaaaaaaggagcagaggtggaagattcaagaagatgatccaatagtgtcaagatgatgtgggccttgatttgcttccccatgtcttggatagtttgaatcagtgacctgagtccattgagttttctaccctaaacctaggtcttttaggtgatgctgtggcttgtcttctataattggtgggtttgattcaaaagctattgaaggccgtggaggggatttgcgttcagaattcaaagtaaactcttaaatttctctttcatcattactcctctgagacatattagatctgggttcgttttgtcttcttctgtcatttttagtgttgcctttgtctgagtgttggagataaatcatcatcaggtcacattccagcccaaaggaaggggaatgggggccctcctttattttagcggcagtttggcaaggagcactagtcactcctgctcacacccaactggccagcactgagtcccacgggcacagctgggaggctgggaaatagtctttaggttggtggctatgtgctacctaaaactttttttttttttttttgagacctagtttcgctcttgtcgcccaggctagagcaatggtaccatctcggctcactgcaacctctgccttctggattcaagcaattgtcctacctcagcctcctgagtagctgagatttcaggtgcccaccaccacgcctggctaatttttgtatttttagtagagacgtggtttcaccatgttggccaggctgatctcaaactcctgacctcaggtgatcctcctgcctcagcctcccaaagtgctgggattacaggcgtgagccactgcaccctgtagctgggactacaggagtgcaccaccatgcctggctttaaaactacttttaaaaaataaagtatattgaaaatgggaggtgtctattcttacaccaataccataatgtcttgattaccgtagctttacattaagtcttgaagttggatagaagtcttctaactgttatttgtgttgtctattctgggtcttttgcctgtctgtataaactttagagtcaatttgttgatatctacaaaataactttagccataaaataaagatgtttatagcagctttattcataattgctaaaaattggaagcaatcaagatgtccttaagcagcaaatggactaataaactgtggtacattcggacaatggaatttgccaggattttcattgtggttgcattgaatctatagattaagttgggaagaactgacatcttgacaatattgagtcttcctatccatgaatatggactatttctccatttatttagttctttgatttctttcatgagagttttattgttttcctgatatagatcttatacatattttgttagatttatagctcagtatttcattttttgggtgacaatgtaaatgatattgttttaaatttcaaattctacttatttcattgctgatatataggaaagcaattgattttgttatagcaatcttgttattatagcttattaattccaggagtttttctgtcagttctttcagattttctacataggtaatcatggcgtctgcgaagatgattttctttctttcttttcaatcttatataccttttcttttttgttgttgttgtattgcattaattagggtttccagtacaatgttgaaaaagagatgagagggcttatccttgccttattcctaatttaactggggaaacttctggtttctcaccattaagtatgacattagctgtgggttttttatggatgctttttatctagttaaggaagttcccctctattcctagttttctgagagcttttgttatgaatgactgtattagttagggttctccagggaaatagaatcaataggctacatatagatataaaaggagatttattacaaggaattggcccacacaattatagaggctgagaagttccatgatcttctgtctgcaagctgtagacctgtgaaagccagtggtgcaattcagttcaagtccaaaggcctgagaactggagtagcctatgatgtaaatcccagtctgagggcaggagaggatgagctgagatggtctagctcaagcagtagccagaaataagagtgaattcttccttcctcctccttttgttctatttagaccctcaatggattggatggtgcccacctgcattaaagagggcaatctactgtatctgattcaaatgcttatctcatcaagaaacaccctcacagacacctagaaatagtgtttaatctgggcactctttggcctggtcaagttgacacatagcactaaccaacacaatggatgttggattttgtcaagtgttctttctgcatctcttgatcagtttattcttctttagcctggtgatgtgttggattacatgatttttgtgttctgtgagattttgactttaatatacctggactggactcagctggcatttctcctgtttcatgtattgtcagctggggctgcagtcatctggtggctcgattgggctcactcatccagggtggctcactcacgtggctggcagttggtgctggctttcagctgagagctcagctggggactgtcaagtggagtactatggtcctctctaaatggcttcatgtggcttacatttcttacatttattacagggcagctgggttccagctgttgcacgtgcagcctgggaagttatacaggtcacttctgcctcatttattggtcaaagcaaatcacagggccagtccagattgaagggaaggaaagactgcacctttttacaggtggagcagcatgtagaggaagagtctgatggagccacctctggagtttctctcttctataatgggtgttatacttctttacccacatgaggacactgaggctcaaaagtattacttgtccaaggtcatatatttaataatagaaataatagagctgaagcttaaacctaagactttacaactctacttcttgtgttgtgatagcttctgggaacggggcgaggggttcctttgcggatagtacaaaacttttctgcaccttaacctgtccagatgctgtcatgctgaccacctcctagcctgaagcttctttaatccttaatgcctttccttttattgtcagtgctgaagtgtttctcaggccattcccaagaaatatcttcctcaaatgcttttgccagtttacctcacgggagccagatccccatgccatgcctaagtatgttcaactgatacaatgttgagccttcttggttcctcatctcactttctaattcaggaaaaagtgctacttacccacattgtagaagtaggtcactggaaaaatcgtctttactctgaacttttttagggcattcatgtctggagcaaacgtgctgcctagaatagactagaggctccaagtgtatttgttcagtgaaatgtctctggtgggcatctgcgtggctactctccttgggcacagagcaggcatctcattcactgctgtctctatcagcagtagtggggttgtcacgtggttggggacagcagactgattttaacagccttagtcaaatggaatctctcagcaaatccacagcagggactcaacagaataccccttcttccccccaactctaccaaattagaatatcttgaagtcatatggaaatattggggtggtgatagtgatccgctatgctggctgacctcgcccctggtgctctgcagtactgtggctaatccacagctgttgcattaggttggtgccttatggtttagtagacataaaactttttgtctctgtttacttttttttttttttttaataagagatggagtcttggtctgtcacccaggctggagtgcagtggcgcaatctcggctcactgcaacctctgcctcccaggttcaagcaattcttctgtcttagcctcctgagtagctgggactacaggtgcatgccaccatgcctggctaatttttgtatttttagtacagacagggttttaccatgctagtcaagctggtctcgaattcctgacctggggtaatccactcccctcagcctctcaaagtgctgggattacaggcatgagccaccacgcccggcccctctctgtttacatttaatgtgaaaatgcaatgtaccatgcatcagaaggcttgtgtgataggccttgaacgaattgatgcctctgcctaaaaggatgccatatatttttctggccatgtcaatttaatgcaatattcggaataaaaactattgaattcccatcattgaaaatcccggtgatagaaggaagtcacctgttttttttttttttttttttaaaaaaaagcacctgggaggggaagtctttgactatttcagtttaccacctattcgttcttatttaaatgttttatttcttcttgtacccatcttgacattttatagctttctaggaaatctatatactttatgtaggttttcagtttgattagtatattgtggttcttaactcttacttaaaaattttttggtgtttcattattttatattttatctgcatcatcttcactcccttcatttcctctttccacttctccctcccttctattttttctttctttgatcaacggtgccagagatcttattaatcttttcagcatttggctttattttctcagttgtttctttttgttttctaactcattgatttttgcccttatctcattatttccttccttattgtttctttaggtttggtctgttcctttttatttcattgtcatgagttgaatgcttagctcatttactttgtaaagaatgtgtttggattgttgattgtttttctcagaaagatttctagaagaggagttatagagtaaaaccacacaaccatttttcaggtgcttaatagatgaacccaggctgttctcaggaaggctgggccaattaacgcttccaaaggaggagatccatttttctgtactactctcagcaagttgagtgctcttcaatccatctcaagtgtattttagtatatgatgtgatattttttcacaaatagataactaaacataatgtcttttttttttttttttttttttttttgagacagaatcttgctctgttacccaggctggagtacagtggcacgatctctgctcactgtaacctctgcctcctggattcaagcaattctcatgcctctgcttcctgagtagctgggattacaggtgtgtaccaccacaccctgctaatttttgtatttttagtaaagacagggtttctccatgttagtcaggctggtctcaaactccttggccacccaaagtgccgggattactggtgattatgataattatgatgcaatcttgatcatgtactgagttcttttgttaaaatttatttttattttttattttataaaaagagagacaagctctctctatgttgctcagactggtctcaaactcctggactcaagcgatcttcctgcctcggcctcccaaagtgctgagattacatacatgaacaagggtgcctggcctcacatattaaattcttatattctgtttaattgatttctcaatcaattcttacatcaatactgtgccgttttaattatttgtgatttacaaaatgcctaagtatctggagtaagttattagttattggttctttgttttcagatctttcttaggctgttcttactggcttattcttccagatatatatttgaaattggctactttcaaaaaatcattagggttttaattagaattgtaataaacttataaattaatttgtaaataattgatatttttataatgtgtctttctatccaataatatattttttctttgcttattcaaaatctttcatcacttcccttaatgaaggtttgtggttgtcttcataatagattctgctaaaacttaagattatttctgagtcttttcctttctccttttgtgattgggatattttacaaattttctagctgattatttctgatctacactaaaggtatttattttggtttatgtattttatatttcagcaatttattgaattctcttatgttccattggcttgattttccttgtccttctatttagataataccatccacagataatgatagtagttttgcttcatttgtttttgctttgctaggacatctagaacaatacaatagttgaatgttaacctgttttaattctgactttaatggaaatctctgtatagtgaaaggttgaacaagctttacttacttgtttttaaaaactcatgttaaggaatcctagcccctttaaattggcaataagtgttgaattttatttgtttttaaagtacctattccttttttgacctattgatactatattttaaagtcatcagttttccagaggcaaaccatacggattcattcctattacaaacctaccatgaccatggtatttttaaacatactgcttttttccctagggttaaaaaatatatggatttctaagtgagagtggttggcctgtaattttgttttgtctcatccccaaatttcaatcttgatatcctgttagctttataaaacaactggagaggattccattttaaaaaatattatggaactgttaaagtagtatatgaaatgtctgcatcagtgtctgatgttattcacttctaagtttgtctaggcatgaaatctctttgggagtagattcattgaaaacttttcagtacctttcagggttattggtatgttttcattcttaagtcagtttgagcaattcatatttttctatttcattattattatttttgagacagtgtctcatcctgttgctcaggctggagtgtagtggctcagtcctagctcgctgcaaactcaagtgcttgggctcaagtgatcctccaacctcggcctcctaagtagctaggactacaggcacacagtaccacacttgcacacttgcttggctatttttttttttttttggagacagggtcttgctatgttgcccaggctggtcttaaacccctggcctcaagccaaatcccaaagtcctgggattataggcatgagccactatgcctggcctgtgaaaattattttctaatgaaaagcagctaccctagaaccttctgattttgcagagcccaggcacatcttcttttatgaagcagctatgttcctgaaaagttgcatattaatgacatttttataaatgaaattgtgcttcccgttgatttgcgttttcatgtcacaggctttttttttcatttttttaatattcagtgatatatctgtagttaatgtttctttaaataaactctagcaccggggagccctcatatttaaagagcttttgctttttctggtgcgaagtatttatttgaatcactactccctgtttctttgtttttatatagttgttcttaaagtgggatacagctagtataacggaacacattcaccttctaccttttgtttatttctttataaacctgtggccttcattattactaagctcgatttatgaagaaaggatacagaagctcatttatagattagttctttcttttacattcttcatgcaacatgctaacctcttacgggtcatgggctttgttaggaggtaatttttcccactgacttctgtgattagaggaacgtggttgcaagatgatcagtaactctgaagaacccagtccagggtgggaaaacagaggccactggtcctgtccttgaaccaggtgtccttgctcttggaaccaggtgagctgactgagtatgtctggggccaccaggggcccttcagtttacaaggctttgtgaaaagacccaattgaacttctcctgtaggagctgggaactggacagcctgtcttgaagcattaacagtgagtgttgtggaacaaccaaggctccaaacattctgtttggtgatgcttcacattatatttggctgtggtttccattgttatctatggccagggtcttaggaaacagttgaatcactgtcttcctattggaatggatcccaagtcttgtagcctatcccttcctccttgcactggcattttcctcctgggttaacactggtccttcaggtaggtgttgggggttcaggagcactacctcaaaacatggcaccttggcatttgagaaaacagcagaagcaggaaagttactcccaacctttctcccctgaagcaggtcataaaactctcatgtgagaggtgccttctctatacacaaaagaagggaacatccttatctcagaagatgaaggatcacacagaagaaataggtcttgctaagttcccctcagtttattaccattagaacatactcactttatccaaatctatttctccatgactgtccaatcttcatcaaacctagcattaaaatacacaaatttggctgggtacggtggctcacgcctataatcccagcactttgggaggccgaggcgggtggataatgaggtcaggagatcaagaccatcctggctaacatggtgaaaccccgtctctactaaaaatacaaaaattagccgggtgtggtggcgggcgcctgtagtcccagctacttgggaggctgaggcaggagaatggcgtgaacccgggaggtggagcttgcggtgagccgagttcgcaccactgcactccagcctgggcgacagagtgagactccatctcaaaaaataaaataaaataaaatttagccatttcttagtcttcatttccttactaaggctcctgtatcatgtgaaacttacattaactacatttgtatgctcttctcttgttaatgtgccttttgttataggggcctcagtcatgaacctaagaaagttggaggaaaaatatttttttatccttacataggagagtgttggcttccaggtaatctgctttcttaagacttctaataagcctcccacaatgacatggggcagagcctaggctagagagcatttgtgggcaagccctagtgttagactccacagctcctcattccttctgtttctcagctggtgctccatgtcagacccctgaacatgcacagagcttatggcttactcttggcttgagagtttccatttcagtccagggtgcttctacttctcccagaagctctaaagttttccatgcaaattaagcacctggtggtctgcccctgcagactcagaatttctcaggtgagtggcagatgagcagccccatttgggagttttgaagcacatttatgcagtgtctccttttacatccattgacatatctgatttgcttttccttgggttatttctaaatcacttttttattcctcaagtggaaattggaagaggaaagaaggagcccctaggcctccagagtgtcatgaaaagccaccccctttctgtaggataatctgcagaagaatatttgagagttgcttaccgctaaattctcctatcattagaagcccgtcttttctgtgcccccttcccattctcaatgactaccacagtctattgtactcatggcttcctggagaaataatcagtaggagctgattggagttttgccaatgtatagaaacagcggggcacgtgccccatgactgggtgtgctgctccctggcagtggcttgtgtcagactagggtgtgtgtgtgtatgtgttttcttctgattattgccctcttactacacacaccccagaattaatttcccatcaaaatgctgagagtgaaaaggggtaggttagttagaggttttaagtaaatggtttaccaccacagctcattggcagcgattaaaatgcaaatcctctcactcagtaggtaggatggagctttgatgtatccttttgtggaagggaagaatcaacagctgacatggtaatcaggactcatcagcagaaattgcttcatttctatgctctcaggcagttttgtggagcactgaatttggggaaatagaaccagggcactggaagaaagagcaggttctgccagacagtcctgtgtgatggggagagaattcccaggcacagaaggcttcttttctgtttgtagcagcctcttgcttgactgtatttgacttaggataaaaactccagttctgctcaaagaatgaaggtctgaggtccctccctaagaataaaactgcctgtgccaaaattataaatataactgcctttgtaggactaacaaattagtcataaaattagaaattatggcttaggagttatgtagctagaggccacaagattctaaaccatcccaattgctcctagggagaacatcactattgtaaaacctaagcttggtgcttgagatattttgcagactttgtactggagagatcagctggtgccacccagatcgatgaactggctcatttgatcttgcggctcccactcaggaaccaactcagcacagcaggacagctttgactccctatgatttcatctccgacctgaccaatcagccctggccctctacctgccaaattatccttaaaaaaccccagtctcacaaggtcaggagttcgagaccagcctgaccaacatggggttttagtagaaaccccgtctctactaaaaatacaaaaattagctgggcatagtggtgcacacctgtaatcccagccacttgagagtctgaggcagaagaatcacttgcacccaggaggtggaggttgtagtgagccaagatcgcaccactgtactccaacctaggcgacagagcgagacttctgggaaaaaacaaaaaaaaaacccagtctccgaatttttgggagactgatttcggtaataataaaactcccatctgacatttaggcagctctgtgtgaattaaatttctctattgcaattcctctgtcttggtaaatctgctgtatctaggcagtgggccgaatgaacccaaagggcggttaccagaagatataatcagaaattctgagggttactgcagcttgtggaaagatgtcctgccacaggttctcctgtatcaactacattctgcagctgggattttcagctaacttaagacaatttgaaaacagtgagttccaaacaggtcatgaatggatttaagttacaatttaaaatttatgtcagggagcatttgtgtcaagaaatgagacaaaggtgatttatatgaattctccaaaacatgaggaaaggttgtttttgtgtttttttttttttgttttgttttgatatgaagtttcgctctttttgcccaggctggagtgcaatggtatgatctaggctcaccacaacttctgcctcctgggttcaagcgattctcttgcctcagcctcccgagtagctgggattacaggcgcctgccatcacgcccagctaattttgtatttttagtagagatggagtttttccatgttggccaggctggtcttgaactcctgacctcaggtgatctgcccaccttggcctcccaaagtgctgggattacaggcgtgagctaccgcgcctggccgaggacagatttttggtctagagctatgctgtccaatattgtactcgtgggccacatctggatagggagcatttgaaatgtggccaggccaaattgaggtgtgctataaagatgacatgtaaataggattataaagaattagaaaaagggaatgtaaaataactcatataactgtttaatattgattttatattgaaatacaattttggatatattggaataaataattaacttcactttttttttttttttttttaactttgtggctattagaaactttaaaattttaagtgtggttcgtgttctatttctgttggacagcactaggcaagatttcattataattctcttgtctgctatggggttcctttctcccactagagggagatatgttccagcctcaggaaatctgaggctagcgtgtaaatgccactgcttttgaatgaactcttaaagaagcaccaaaaaaaagagcttaagtttttgctttgttttaatcccgtgtaactctgatgtttctaaaggttgcagtttctgtgaaagtgaagccaaaacagaagcgggaagaggcagaaagtttttctaccctctttgccttaatgaattcagaggtttctgttacttctttgttggatcacagtaacttgtcatttgtttgccaattgttcctttggacttgagtctgtgtgtctgtgtgcagtgcaacacgcaaataggtgcgtgcacgcacacacaatggtcttgcgtgcagctgtcacagagaggaccagtgccctactgcaatcacacacctccatggcacacccagatcacttggattgcactgtggctggggctcctggaggtgtgcggtgtgtaccctgggccggtttgcaagcccctctcttttctgttgttactaaatgttgcctgtggtctgacgcttggcttgctgtttgcatctggtgtgtgtgaatctgccccttgatcctactctgaaaccagcattatttcatgattatattttagtgacagcactctctcctgggtttccttctggatagctcctttttggtttcttgaggtttttatacttttgttgatctgatatgcattaatatttccccattcttgtctatgtactctttgtccttttttgggggggaatctcagccattctggtggttttgtcccacccttatactgagaacttgtaagtctttatctccagcttagagcattcctttgagctccacccgcatccatgcagttgcctacaggacatcgcacagacctcagcatcggctcccacagcattccttcctgcatcatggcactgatcagcactatcatagtttcttattctgtgtttgtctatcttccccagcatacagtaagccccaggaagacaaaagccacgccagtctggttccatttcattgctagtatcttgtactgtgtctggttactgtacctcctcaagaagtgttggcagattttattttatcttttgtttcaaatcaactgtattgtttacttacaaacatgctcattaccattatatgactattttattatattttgttagcattatatcatagcggatccaatcaccatagttttgtggcatagtctgtgtcaaaatttcttttttttttttttcttttcttttttgagatggagtcttgctcttgttgcccaagctggagtgcaatggcataatcttggctcaatgcaacctctgcctcccagttgaagcaattctcctgcctcattctcctgaccatgccaccacacctggctaatttttgtatttttagtagagatggggtttcaccacattggtcaggctggtctcaaactcctgaacttgtaatccgcccgtcttggcctcccaaagttttgggattacaggcgtgagccaccatgcccggcccaaaatttctaacagcgtgtgcacatgggccatttgcagtaacccttcccatgttttcctgtgttggaaactcttctcctttgctgtctccttttgtgacccttattacaagccaagtttccatcagtggctctacatatttccaggaacttaggtcacagaacactggaaagcaaggtcaaggagtgtggtatgtttccgtgcctgcaccttagtccactggctgcttttccaggacatagtccaattctttcagtgcttcagctcttcagccagcccagttttgtttagatttgtgactaacgaagactttttttttttggtcagaacacgaagaggagctggaccaggaatttgagctggagactgacactttatttggaggattaaagaaggtacaaagtggatgcataataaatctcagttttcaaacctgatttcaatatttcacatcacatttgtatttggagtcgatccaggtatcagattcagcagcaatctggaatgaagcaccctttttgccgtaaaggtgtgagtgtgctgtgttggggaaggcgttcccagggtctctatgttcttgtcccctgtactcttctgaagataccagaaatgtgactaaccttatcagttaggacagttttcacttttgtaaagctcagaaacttcctacttgacctagccagatccatcagaatcacatgcggcccctggacgctcctataccaactgccggcagctgcaggaacatcttccttctggcctctgagtgtccctggctgtccatgctgctgcagagcatgctgggaattcacatccctcgtccctctggtagggcggtgccaggtggctggctcgcttgtcttcagcagcagctcattttgtctactttggtagcaggcagagtggccactgttctttcacatacccatgtctttctagatgtgaccagtagcacttctgtgctagagtatatattctgggtaggtaccagacccttctcttccagttgagagatgcctgactacttttttctcccaccagaacccctgtcccttttaggctggggttcttctcattcttctccattcagtttctcaggaccccatttcagctatgacttggactgtagggggtccagggcccaggtcatggtgggggcttcgggtcaaggctaattattggctgtatatttgttttctaagtatttttatatgtttttaaaatgttatcagagcagtttgttttgttttgttttctatttttactttatgtaatataccaaatagattacagattcaatcagccttttgtgggctggcttgggacataaaagacaccttgcattccaggttctgaacactctgcttgcaaatgaacttttgcaagacagttcatttccaagttgggtactgcctgtactaatatttttctattgaaagttgcagatcttgcttgaattgtaacaaatgtagctcaatttccattttgatttgctagggtagcctgttcctttctcccagctctgtacagagccatatgtaagatacaaggcccatgtttttctgtaactgagaagagcatcctgccctgcatggggtgccattcttggcttttgtcgctctacccaccagatgcttccatgaaaacttagatgtaaattgaattttcatccatggcatccatttctagatgtttcttatttaaataagccctttttaggattgttaataagaatgtaatgtgggtagtattgtgcccacttcagagatgaggaaatctgggaagctttgtcacaaagtggaatttgagatgaaataggaggtagcctttctgagtgtctcagatctactctttacgaatgtaacactagcggatgtcttacagcagaaaaaaagatgatttttttttccttttagagttaaaattcaagcattttagataatattggaaatatagaattatttgccaaggcaaaaataagcagacacatttgaaagacttttagctgcagaggaacaatggtgaggcagcgtgagaaagtgaacacagggtcaggccccaacaagttttggagctgccacagatttcatgatcaagggcaggctcagcccagccatgcgttgctacttctagacaaagcggccttgtcttcactgacttcccagctcttgtcacttcactgggtcaagcccagctgcttgactccctgcagaggctccagagtcctgcagagatgaccccttctcagtgctctccacaacagctctcataacaggtctggggtcgggagtgttgttgctcaggccaattctgccttcacagaaaagtccacgtggcacagacacacacactctgggagctccaaggattccgtcttttgccatcctgacaaatctgtccatccctctgtctgactatccattcatctaccagtgctctgagcacctctcatcttctcatctctctacttctcatcaccttgcatgtggggtgggtggtttggagccctagaatttacggaggaaatgggtcctggtgaatatccggcagaggaaggacattgatatgggtccttaggatcaagatactccttgctgaatatttcttttctcagaggctgtaggaagtggcaagcacatgctattttggtccaaattctaatcaaaagaagatattagatgtgactagaaatcatgacctttagaagaaagcttagttttctgaccagcccatcccttgaatgttagtctgcagctgggttggtaaacctcagtactgctgacagtttttttttttttttttttttttttttgagacggagtctccctctgttgcccaggctggagtgcagtggtgtgatcttggctcactgcaacctctgcctcctgggttccagtgattctcccacatcagcttcctgagtagctaggattacaggcacctgcaaccacatccagctaattttttttatttttagtagagatggggtttcgccatattagccatgctggtctcaaactcccaacctcaggtgatccacctgcattggcctcccaaaatactgggattacaggtgtgggccaccatgcctggctgacattttattttgttgagatagggtctcgctctgtaacccaggctggagtgcagtggcacaatcttggctcactgcaacctccatctctcaggttcaaacaattctcttgcctcagtctcttgagtagctgggattataggcacacaccaccacgcctggccaatttttgtatttttaatagagatggggtttcaccacgttggctaggctggtctcaaactcctgacctcaagtgatccacctgcctcagcctctcaaagtgctggcattagaatcatgagccaccatgcctggccacattttattaaaaaaaatttttttttttgaagagatgtgatcctgctctgtcacccaggctggagtacagtggttgtaatcatagctcactggagacttgaactcctaggctcaaacgatccttctgcctcagcctcttgagtagctgggactacagacatgcaccaccatacctggctgatttttaatattttgtagagatggggtctcactatattacccaggctggtcttgaactcctagcctcagccttccaaagcactggggttacaggtgtgagctatgctgcctggccactactgacattctagattagatggctgttgtggtgagctgctctggacgttgtacaatgcttatcagagtccctggactctacctagtagatgctagcagcatttcctgccctaagccttaacaattttaaaaagtgggctgggtgtggtggctcactcctgtaatcccagcacttgggaaggctaagaccagcgatcattgaggtcaggagtagcctggccaacatgatgaaactccatgtctactaaaaatacaaaaattacagccaggtgtgtgcctgtaatcccagctactccagggactgagacacaagaattgcttgaacccgggaggtggaggttgtagtgagcagagatcgtgccactgcactctgcactccagcctgggtgtcagagtgagaccttgtctctaaaaataaaatcaaaaacaagaaacaatttaaaaagtctccatgcattgccaaatgcccccaggaggcaaaaatcatccccttttaagagcagctggtctatagcaatatttaagggctcttaaatgaccactcccttggtcatgccgatttgccattcttacctttactcatcctgttcctcttctggattggggctcacgccttccctgtccggcccttactcagacttcagatcatagctggctccctgtcacgaagcattgcctgaagctcaagctgagcttggtgctcatagttcctgacacttccctgcctctctctttacttccttccacaaatacagctttcaatgagagtgtctctgtgctcaagtccatatggagcgctggggacagtggtgagccagacagacaacattcctatgctagtttctcctactagggacaggctgaccgcaaacaaatgaacaatggccacagattgagctaaatgacatgaaggcagtaaacagggtgataggatagcactcttttggatgaaatcgtgtaccctattatgacaaatttatttgtagaattttatttgatgttgtcctttctgacttagattgtgggtcccacaaaagcagggctgggatttaatcatttctgtatcttcaatgcctggagcagagtcagtgagtattttattgaatttaactgcaggaaagagtgaagggccaggttgcagcatggaggtgagaaatacattggtcctacgtgcctctagatagccatgtaggtaagtgggctaagtgggacagtgtgtagagtcagagtagggagacaccattctgggcacaaaaaatcacaaactgcttctgggagaagggggctgaccttcacctgagctccagagaatgagtaggatttggcaagatcatcagtagaggagatgctgttccagtggtgttgctatggttagaaaagggaagaatgtattagggaaatggtgagtcaaagtgaagcttcacttagggcagtgaaagggagctggacctgactgtagtcctccagtttttgatgatgttcaggtttggaggattacagccccaatcaagaatgcttttgatctttgtcatttctttgagggtaatgctgattgcacttgccaagacaacagaagtggtgtgggtgcttgcgtaggtgcggctgtcaagggctgttcagactccatatgctttggtttttgcatcctttttttgtaatgtttgctcttccaggctgtcagggtaaaagcccctcccccaccccccaccccctgcaggctccagtgtgctgtgctagaatggggtgaacccagccttgctgggttctggggtgatctgtcgttgtatttgccagtccctttttctttcttcttgctggtcttctctctagtgatgccagggagataggggaaatatttcagtgcccacattgcgtgctcgatgaagtaaacatgtttctagacagtagcatctgaaccaaactgatacaaatgaagttctatgtcaggtatattgtcattcatttttttccttttatttaggattcaagatcataaattcttggcataatggaaagagcacaggtttggagttggatgggcttaagttcaaatttggctttgctacatctgagaaaataatttgcctcctttttaaaaaaatgtatgtatttttttgagacaggctgaagtacagtggcatgatcttggctcaccataacctctgcctcccaggttcaagtgattctcttgcctcagcctcctgagtagctggggttacaggtgtgtgccaccacactcagctagattttgtatttttagtagagatgcgtttcgccatgtcggccaggctggtcttgaactcctggcctcaagtgatccacctatctcagccttccaaagtgctgggattacaggcatgagccactgtgcctggcctcatttacctccttttagcctcagttttattacctgcaacatgggaatacaaggttatggagaaagaggtgatggacagaaaacacccagcatgcttgtacttagtacagaatagatacacaatacctgttactgtggttattgttacttttttcttccatggatgaataattccttcctttagcattaagaattactgattcttggtcgggcacagtggctcacgcctgtaatcccagcactttgggaggccgaggtgggcggatcacctgaggtcaggagtccacgaccagtctggccaacatggtgaaactccgtctctactaaaaatacaaaaattagctggatgtggtggcgggtgcctataatcccaactacttgggaggctgaggcaggagaatcgcttgaacccgggaggcggaggttgcagtgagccaagcctgcgccattgcactccagcctgggcaacaagagtgaaactctgtctcaaaaaaaagaaagaaaaaaaaaaagaattgctgattctccctctgtagcaaggaggtaacgttctacagagagacatttacatgtagagggggactgctgttgaaaggagctctcaaaatcctaatgcattatgaagagtgttacaagtaatcaattctgttctttcctgaggacacattttcccatgacaggtttctgaaattggggcagacctctaaataagctgttctttcagaagtaaaatcagagaggactttccattgcctgtgaggaggcttaggaagaagagacagaggcagacgggagcttgaatacgaatgactatgaacatagataaagaggtacttctataaagacacagttcttagctactcatgctttgcccatgaagatttttaagatttggcttatttataaatgcctctgcattttaatacttcaggaaaacaacattccattttgactcatttaacacatgagttaaatgcacacctgctgtgtaagcagcttccaggccacgtgccagggatgctgtgacattccaggctcagtctctgtcctaagtgggctctgaagtttgggggaaggtgatgatgtgacagtgagctggtggtgcaacagccactggggcttgtagagacagagggtgcagagaaccccagcggcagggactgaagggaggtgatggctgggagacgggaaaggtaggtgaagggtatagcatgcctgacgacctggatttgagtgaaataaatttggcttggctagaaggttgagttgtgaggagggcaaatgactcaagacagggaggggatagatcgtaaaggccatgaagtgccatatgcggagtctggactttatccagaaggcagtggtcagtcattgaagggtttcaggtgccatttgttctgtggactctttctggagccctctgactgattttcctgccttgccctgtctctctcttctttctcttctctctctgcatacacatatacacacacacactcttgatctgttagttttgcagagctaaacccttgattctaccttcaccttattttctcctagcttcttcaatgacttttttttttttttttttttttttttcctgaatgcagagtctcactgtgtcacccaggctggagtgcagtgcatgatcttggctcactgcaacctctgcctcctgggttcaagcgattctcctgcctcagcctcccaagtacctgggattacaggtgcccatcaccatgcctggctaatttttgtatttttagtagagatggagtttcactatgttggccaggctggtcttgaactcctgacctcatgatccacccatcttggcctctcaaattgctgggattacaggtgtgagccactgcatctggcctttaaggacctttttaatgaaacaaataatatttcccatgaactactagatagaagagagagagaacagagcagggtacctggtggctaaaaattaataagcaaatttgatgtttatccattcacattgcagatgctatttttttttttttttttttttggagacggagtctcactctgtcacccaggctggagtgcagtgacatgatcttggctcactgcaacctccgcctcccgggttcaagcgattctcttgcctcagcctcccgagtagctgggactacaggcatgtgccaccatgcccagctaagtttttgtatttgtagtagagacggggtttcaccgcattagttaggatggtcttgatctcctgacctcgtgatccaccagccttggcctcccaaagtgctgggattacaggcatgaaccaccacacctggctgcagatcctatttttacgttaggcagagagctacaattcctattcctgttctcaccaggaaatcactaacatcttacatttttcctacctgtccgcaaatttacatgtcaggaagaaaatctagcatggatgagactagacaaaaggtcatgtactgatgggtaaagagccggcattctttgtgttcacaagaaggaagcaaacctgaccttccatcaccaatcatgggtttcttttttttcttatttatttttttgagacagagtctcactctattgcctgtgttagagtgcagtggcacaaccatggttcactgtaacctctgcctcccaagttcaagcgattctcgtgcctcagcctcccaagcagggcctacaggcatgtgccatcatacttggctaactttttgtatttttagtagagacaggttttcaacatgctggctaggctggcctcaaactcctgtcctcaagtgatccacctgccttggcctcccaaagtgctgggattacaggtgtgagccaccctgcctggcctaatccatgggtttcttgcccctgacattttggagactcttcaacccacattctttggaggggctggcatggaacacaggaatctgtctctgctaagcaagcctctctgggaaggggaaaaactgtataaaatccagttttctggtaagacaggctgaacattcacgcacacagccaaatcacttattaatctgctcccatcagatggagggaagcagagagatgacagacatgctggaataatctttgaggggctgcggcttaatgaaaatgagttaaggcctaacctctgtaaactcaccagagtttacacacatgaaacaaagcaaacgttgccaagagatcaatgttcctttataagaagtccccaaccccagtgggcatattcacctcaattcagcaaacattatcaagagtctactaatgtttgagggagttcgatgcaaagatgaagacattcccactgttgagaatggtgagaaatttctcagtcacaaaccagtcagcttacaagtcagtgcttactgcctgctttctgatctgggttgtgataatgctgtgggttaaggaattaagaggcattatttctctactcaacaagtttatactctatttgagaattccaggaggacacccctagctttaatatggctgatgtgtgaagtatttaacaagggccagagctgtacacagccaggacaattggccctgctcgtgggtcctgcctgaaagctggccctggcatgccatttaacaaagtgttttccatatgtatgattgtccctagtcggtgtagccaaaaattgctgggagagtttctagccttggaatgatcagagaagactctctggaataggtggattggagctgagtcttgaatagaagtactatgttttgaactgacccaagcctattttgttgtttaacaaaaataaagttctttggttttactcttggtaacttctgtcacttggagatggacaggagttaaatgtcttctctcccacaaccttgccaccaagtggtatgttaaacagtgaaggtgtctaactgaattctcctacaagtacaaacattcattaggtagggaagtacaaaaccatcattgaacttgttcctgaaagcttgtgaagcctctattgtctgtctttaggtactccaacaagcatcttgcacggaagttccttctgaggctggtgcaattctattctgctggctgaagcagttacccttctagtctgattagaggatagagccttattaaagcaaaggacacagaccaagagagtgttagactttcagtgctttgggtgctgggctcaagggaggtgtttttttttttttttgtgatccttctggctcagcctcccaaagtgttgggattacaggcgtgagccactgtacctggcctcaagggattcttacatacatgcttcattattacaagggtatcagagcctgagaaaaattttaatccatcacatattgagcaccatgcttttcattactaaaatatttatttctaacattccttatgctagtaaactttcaggtgcagctttaggtaccatgttggaattatttgaattgtagtcatgtctgggagtagatttctgattagaatccttcaaatgctaactcactctttgtggactcctcatttggatactttcaatgttaagaactgtccttagaggtggattaaagttaatttacacacaaacatggaagtgctgtaacatgattcagacttatataagtgccataacaagactcagagagaaagggggacgggattattccagcctagggcaggttgaatagtggcgggatctgaaatttggggggaggtatggggaagtgggaaggagggaaaacatttccttctctcagtacatttcctaaaagtggtgcctgtcagcattcttaaaaaggttattaccttttaaaatcatgacatgacagttgataagcctttgttaaaaagaaattaagcagcagcagcaaggtaagagcgagatcacaggggcacgtgggagaagatgtaaagtggggtgtctttgtgtggggaactgactgatgctactttcagggatgacaatagctgccgaaaagttcgagatggatgaaggtttgttattccatcatgattttgctcccaggtttaatgaaagcaaagctcaggtcaaattctatctggcatgtgtacgtttattaaacacttactaggcaagcagtggaaaccagtttacaccaagctgatcagtggaattgatggagtcctttaaggagcttgcatcaccaccttgcattgaatttgttactaggtagatagataatagaatgttatctagagaaggatggatttggggcttttttgcagacaggcaaccagaaattctcccaactatgtggctgagtttaggatcttaaaggccatcacttaagggggagtctccaaattgtctaagccagtctgtgtctccaatgttaatgttgctaattagcaagtcagatgtcaccagggaaagttacacagacttttatcatgcaagtattcagacctttgacatggaaaacaagagttaactgtctttgcaagttctgttacacaatgtttaaacaaacagtgacaatgaatcacttaagcctaaagttgcaccataatgttttcctctttaagtctttttttataaaacatgatctgcctccccagggcaaggcttacaaaaaattagcttataactgatttgtttctctccacggaaatctttagtaaaaggcgaaagatttattcgatctgaagagaaaccagtgtaatgctacaaattagttcaactcattgttgcagtaaccgcaactcctagtacgccgatggtgcctacagttcgcacaaaaagaattactgcctacagtttgcacaaaaagaattctttaatcttcccatagttagaaatgttgagtcaaaagaaatattcttttaagctttaaataatttactatgtgcagggtactatgggtatgcaaatgagatgttgagtcatcaccttgagattccacaccttgttattcaccgggtgcctttggtgctaccactagggggcgaagtagaggccatgctagctgagttctaaatcccatcctgggttaaccatggaaactcgttttagccctttttgtataatgggacttggagtacgatttgttatctttagcatcatcttattttgaaacaattacacatttacaggaagttgcagcagtagtacagagaggccttgtgtacctctaccgagcttccccagtggggaatctttttttttttttttttaatcccttacttttaattttagattccaggggtacatgtgcaagtttattacctgggtatattgtgtgacgctgaggttgagggtatgaatgatcttgtcacccaggtactgagcacagtacccagtagttagtttttcaggccttaccagtcctccctgccaccccccagcagttcctggtgtctgttgttgctaacaggagaacctgatggttagctccccagtggggaatcttccatagtgaactcaaacccaggaacttgacattagtacaacccacagactttaatcagatttcacctgttttgcaagcacttacttgtgtatatgtatatagttatatgtggttttatcacatgtgtagattcatgtaaacaccaacatgacaaagatacagaaccttgaagagctactctgtgctgcctctttgatggccatactcaccctcctcctcttcatctctaatccctgaaaaaccacaatgcttttaaatatatatgtatgtgtgtatgtgtatatacacacacacatttaggattcttatatcttattggtgagaagatatttttatcattctgcaatgaccctttttgaccctggtgattttctttctctgaagtctactttatctgccattggtagagccactcccactttcttttgattcatgtatgtatgccatatcctttttcatcttttaactttccacctccccatttcattatatttaaagtgaattcctgtggacagtccagagttgggtcttttttctagcaatccattctgccaagctctgtcttttaattgctgtatttaatttgattggggtttattcagcttcttgaatttgtaggtttatgctttttgccaaatttggagatcttttttttttgccattatttctttgaacgtatttttaacctcatattttttcttctttccttctggaaaatttaatgacaccaatgtcagatcttttgttcttatatcaagggtctctgaggctgtattttttcagtcagttttctctctcttgttcagattgggtgatttttattgacctatccttaggttcaataattaaaaaaaaaaaaaaatctcactctgtcatccaggctggagtgcagtggcacaatcttggctcactgcaatctctgcctcccgggttcaaatgattcttctaaccctcccaagaagctgggattacaggcatgtgccaccatgcacagctaattttttttttttttttttttttgtatttttactagatagggggttttgccatatcggccaggctggtctggaactcctggcctcaagtgatccacctgcctcggcctcccaaagttctgggattacaggcatgagccaccacgcctggctcaataattctttcttatgtaatctacttttgctattaagcccatctagtaagttatatattaagtataatgcattaatgtaaatgttaatatttatatcaacatttacttaatacttaattttgttttgcttattgtcgttccttaggccctgagctctctagccagtctgctcttttcaccattcacaatccccttacattcgttttatatgttacatccaagggttttagctgtcgttagtggagggatagggataaatgtgtgtactatatcttgtctgaaagcagacgtctctgtgttgtagcttgtgttttaaagtaagtcttaggcatcataaatgagttattttattaatacgcaaatagatttctgaagaaagatggtggaagtaatggactgtgggggaaggatggggcagtgtgccctgaggatgtggtgagccttggtctcgttcttctctgtctctattcccagtctcccaggcccctgggctgcctgtgacggctggtgggttcaggggtgcgctgggtggggaggtgtctcttggacagcttgggcagctaatgggcaaaggggacagatgtaaagatgtatgggagaactccagcatagttctgctcacctgtttccctggtctttcaggcagtgtgtaaagtagaaaggtggtagctgggattatggagggttcccttcttcttcccctagatagatggcaaaaatgttagttctccctttttctctctgagatcacactttctttaattggccttctgccctgggggcctccaacattttgggactccatgtggagttccagtttgctatgtctgcccactgcagagatgttctgtacaaatcagctttcttgcatatgtgaagacttcctaagtataaagtaagttctttgagtgtgaggatcattttaggggctgtggcccccaacaggctggggatcttttttccttccacgttattgtgactcactttgtctttttgatattctgggaaagtgacactaatggtatgtgtgatttattagcatagtttgaagctgaggaatcatgattctgtgtaatttgttctctagtcatctcattctattacatttttttcatcatctccaatttgtttatcaccttttttcattgtttatagctcttttttccatatgctgtgtagaaaatagtgtttttccaatttgagagatgtggggaaaataatacagttttgtgccttcaacttcaccctgaaacttaatatttctttttaagcatttgattccttctttgctggctttaggaggaaaggaaaggtgggaatatggcatagacagagcagggagacagaatctattcaagttaaaccgaatagactctgcagtcttgctctcctgcataatccaaagtgacttctgagaaacaggtcagtaggtagagttgtgaccagaggatgttactgagtttaggttggcagttgggctgaagatacgcaaaataacttacccatgttaattaggtcctcttgatgtaattaaaccctcttaagaggctttctcttttcttctcccacaaaacacctcccctttaccattttacactggaccaatttgcctggcttctgtggcgaggggcaatgaagaggctgggaatggtacacagtagaacagggcagcctgtgcctgtcctgttggcagcatccctgcccttgcaagcaacttcacctatgcaggagggtgaagatgtttcagtagggactttgttatttacagaaaaaaaggttttattagtggaagcattttatctttaagaaagtattgattgagagagagtgttgtctctggaaattgtaagcagtaaaatgatttagttcaaattcttttagaaatagaaaagcagctgttgaaggaaaaagaaaactcttccaataattgctcaatgaatcattagcctgagttcattcggagagcagtgcctcttttgtgcagaattcttacaaaattagtctccttttgtgtttcttgtctggagatttacgggccattaaggtcagtttgctgcctttgaatgtgcagggaaacatttatgatttcaagaaccttataaaggttttccctgatcttggataagtcttactcagtgtaattagaaattatatatggtctcaaagtaaacaataagcaaataatgctatttaggaaataggtacacaaacatgtatagtatttctgtagtattttatttttacaacttgctagatataaggataaggaaaatagtaaatatattcagctctatactgttttctctgaaggaaaaagaggtataataatgaaaaatataaactggttggtaaggtaggtcatttccttgtttttctttaaaaattgatatacaatagttgtataaatttttggagtacatgtgatactttgatacctctatacagtgtgtaatgattaaataaaagtaattgggatatccatcacctgaaacatttatcttttttttttgtatagagaacattacatatcttttggttttgaaatacataaatgcatttgtgactgtattctaacaaacagtcactgccatcattacctagttcttgagcattcattgggttgacctagctggtgttttcttccatttcattttcctccattgaatagacttatttcagactagtgttcttcaaagtgaactgttttcataatgcttttgttataaagctggagctggattccaatcagaggagacatttcttccgtagtatgttagtcatggttccattgcagacagcagaatctattgcagttattttaaaaagagaattattgcagggatttaaagacatttgagaataatagaaaaacctgtaggagcaggcactaagtgagctaccagaaacagttccaagagccactgtacacaacatctgctgccacatagctccttgcttgagaacctagggctctggtgccacatctgacagcttcagcatctctgaactgactggaccccagaatctccagcatggctgctgcagaacagccaaagggtctctgccaccattttcttcagaagtctcacagaccatacattgtttctttactctgagagtcatagtgtttgtatttgttcatgagaagctcagccatttttagacctgccagctacagggaattctgggatatttagttttcaaccttctaacctgtaatgtgtaggaagtcatgctagagaggagtaaatagtcatggttgagttaatcggcagtacctgctgtacaagcagatattttcttcttaggaaaaggttaagatggttgctttcctgaatgctgaagttcctttttgttaaccgtgggctcacttcttttcagtccacagtctctagaactttcttctttccttcttttggactgggtttgggatcttgaacagctgaattcttatattttaactatgagtgcttctaactgtttcaggatatgcagcttgaaaactcctggagttgtgtttctgggcctatcaaagtaaaatcgagtttgttgtttgttcgtttatttacatatttactgaacaaacaaggacataatacttcatacattcctggctgtattccaagtgttctccatactttagtttatgtgtttcttataaatatgaaatgggtcctctattgtaatactactgtactttggccatggcttgagagtcagtaattgatttttcggagagtgggccttgagttggtcaggataatttgcagagaagatcatccactggaactattctgtgagcttatattttctccctacctggggttataaaggcattctagggcagataccggatgctccacttttggtatctcttctccctctttcccagtagactgtgctgataccaggttcctaaaaatagtttgactcattgtataatcattcaaatttttcaaatttttattgagtatctaatatattctgtttattgaagaatacaatgcttaatctatatgtagaccctgtcggaaaggagctcacagtctagtggagagacagctcagtaacctgtaattaaagcacagtggggactgggtctggtggctcacgcctataatcccagcactttgggaggctgaggagggtggatcacttgcagtcaggagttcaagattagcctggccaacgtggtgaaaccctgtctctactaaaaatacaaaaattagttgggcatggcagtgtgcacctgtaattccaacttcttgggagctgaagcaggagaatcacttgaactcaggaggcggaggttgcagtgagccgagatcatgccactgcactccagcctgggcgacagagcaagactctgtcgcaaaaaataaataaaataaaataaaattttaaaaagcacaatgggataagttgctttgttacaggtaaccgtagtggcatattgtgggagcataggcaagggacaccgagtccaggctgaatggatggactactaaaggcttcctgggagaaggcttgcctgagctgagacctgaaagatatgtcctcattcacatgatgcttcagtgatggtttttccaaatagagggagcaaagtgtgggaggcccagctgcatgaatgtggtgctgtggggtcagaggggtcaatgcagttgtaatgtgggatggtgggggcagtgaaggttaggtacgacgatggaagggtggacagggggacagggccattttatgaagaactgcatgagtctcactgagaagtttctctggaatgctaaggggagcacatgaagaatattaagtgggggaaataacatgatcaaatatgctcttaaaaatattactttggtgctgtgtagggagcatggaatggaaggaataaggctaaatgggtagaagtgagtagagcacagtctgcggaattgaagtaggtctagcatatagtacggggaggaaaacgattttgcagtaactccaagactttcctggataacaaagcctaattgatatgctgtgattgactatatgaagcagcatatactagatgcttaataaaatttattgaaagatttgaatgattatgcagtgggtcatttaaaaaaattttttacttttatttttttgagacagagtcttgctctgttacctaggttggagtgcagtgacatgatctcagttcactgcaacctccacctcccaggttcaagtgattttcatgtctcagcctcccgagtagctgagattgtaagtatgcgccagcactcccagctaatatttgtatttttagtagagatggggtttcaccatgttggccaggctggtctcgagctcctggcctcaagctatccacccaccttagctttccaaagtgctgggattacaggcatgagctactgcacccggcctcaaatcatttttaaggcttacccatggcctttcttagactctgcttcatttgtagatgtaagcttctgagctgatagcaaactatctgcaaataccatccatagacataataaaacagtgctcctgacccatctcactaggagataaacagtggaactattcagcaggtcatggactgattacaaaaaaaatccaaaaagactccaaaaacagtgggaccagggatctgggttgaagaactggtggactgagctaactgatgtggctacagggtgaatttctctcattcacttagggcgtctcggtgagtgccttggcacttggcttggtactttacattttagtctattgaccaggccttattagctatgcgtttgtgttgttttcagctggagaatagtcctcagttttctggggaatgcaagagaaagcacagaaccagaattttagccatctcttgtgataacaacacagtactccagctaagaggctgagagtgagttgtgatctggcaaggtttaagggcgatgagaattcaaggctagaaggaggaaagatttactcagtggtgagttgctagggcaagtcctcatttgccaggaattttttcttgtaactttcttccctagtgacataggggtgtgagaagaggggacgaccccttctccacgggtgggtgacaagcactttcttagtatttctttcctttagcctagaaaataattgtctttcccattttctgaaaggaatcttagacattgtgctagtggagcccttcattttacacacaaggaaattcaatcccagatagttaagtgacttttccaagtttaaacagagggagaaatgtgacaagtactagataggctgattttttggctccgttcctgctcctcgccattttaaaggcttgctgaatgttgggcatctaggagacagatttaagtcaaggttcttgctctcagagagatccatttttccctccagagagaaaatacaggaataaaagtgatataataaatatgccataataaaagttctagaattgagatgtggatgacggagaagggagtgcaatgaggtccacctggggaggtaggtatgggaaagcttcactctggagctgacatttgaattgtaccatttagtgagtattttgtgcatgtcactgggctggctttgtggttacggggcataaatgaggtgcactctaggttggagattgcctagtcaaatagtgttgtggggcaaaggggtgggaagggcagaaagtccaggtacagggacaagcatgagtagaaacatctcagaaaagggtttcctccttggcttcagacaggcctaggtttgaaacccggctctgccccttactaggtttggataaataatctgctttctctgacctccagttaactcatttgtaacacggagttagacagaactactcaaaaaagaaaaaagaaaaagtgagcttcaggccgggcacggtggcttatgcctgtaatcccagcactttgggaggctgaggctggtggatctcttgaggtcaggagttcgagaccagcctggacaatgtggtgaaaccccgtatctactaaaactacaaaaattagccaggtgtggtggtatgcacctgtagtcccagctacttgggaggctgaggcacgagaatcacttgagcctgggaggcagagattgcagtgagccgaggttgtgctattgcactccggcctgggcagcagagcgagactgtctcaaaaagagcttcaaatcactgacgaaataaaaagaaaaaaacccaaaacttatttatttcagctacatgacatcctggaaaaagtaaaatatggagacagtaaaaagatcattgtttgccagggattgaggggagcagggccagggtgggagggatgaagaggtagagtacagaggatttttagggcagtgaaactatttcatatgatatgataatggtggatatgtgtttttatacatctgtccaaacccatagaatatgcaacatcaagagtgaacccgaatataaaccatggactttggggtatcaatgtaggttcaccagttggaacaaatatattactgtggtgggagatgctgatggagaggggttaaggggtctatgggaattctctgtacattgtgcttaattcttctgtgaactgaaaactctctaaaagataaggtctgttaaacaaattgagctactttaaagattgttatgaggctgtaattagaaaacacatactcgagtgttcatcagtgactgggaagaaaggacaggtctgtcagtttcactgacatatgaagttgagttgcagcactgttacccctctcattctgcagtgggtttttggtgtgtcttcattgtggggtgtggtggtcttggtgctgggggtcttcctatttagactttgagctcctcatggtgcctagagcagaactctgctgtgggtaggaaaagaggcagttacaaacactaggcccagaccctttcctttgttaagaaaggaaaaagtgttttgctaggacgttagagttactatttaagaaacccagaacaatcatgtctctcagagtccttagtattacctggtagcagaatgtaagcctcagaataaacaaccacatttgttaacttgttcagtgaattccgaagtctgggtgcccagagctttgaacggtgaacgggaggatgactgctctgttggtgagtgttaggtagcagcttcggagtatgtgccctccctgcctgggaatggtacggggcgggctgagctgttaaggattctgtgagtttatgaacattcagctgtaggaaggcataatcagtcatgtagattggtccccaggctggtagtatcacatcacctggaagcttgttagaaatatagaatcccaggccccacccttgattgactgcatcagaatctgcattttagcaagatgcataggtggcttgtgtccactttgaggttggatgtgggtgacttctccttggagtacagcctccctgcttccatggagaagcctgcctagttctgcctggctgagatttagctccagtttatatctgacccccttagagtgccaaagaagaggttcctaattgactaataaccatggaggcaagaaagaaaatgggggaagggacagatcatgatgttgttcctgatttcaggctttcatgtttgccttgaaatgtgtgactgagctcagagtctataaagcttttgcttcaagaagcagtgagtcaatatttttcttacccaaatcattaaacatcatcttgacctattcattggcccagcttttctgtttggtcatttcccttaggtaacttttttaaatagggaagaatagacatgagagagacatttttatttcctttaaatgaatgttttctgtgataattagaggtgaaaggccatgtgtaatttttgttgatgggattttaccagcagagttttcaggagtcctggactttctggtggaacagaaagtcttatatgttttgttgtattatatccttttttccaccctaaaaaattaaacttggagaagtttcgaggcataggtaagcttggggtcatgaattctaaatgtaattctaagtgttcaaaaatgttgtatttaaaaagctcatatgtttttctttttttttttttttctttttgagtttgtattaaaaaagtgtcttggcttttgtgtcttttagctgtatccctgttataaaagtggtattttactagcatggcctcatcacatgacctttgaacttatttacatttgtttagttaattgactcttggctaatttggaaatctctagatggggaaataagctgtggatcagggatcaggagccaggttaaagctttgagttctctgctgtgctgcctggctgtgtgtttgtgggcatgtcccagactctggtgtagtcatctctaaatggaagcaattcaactacatacatgatttccagcaagggacaggggctttatgagcaggtcatgtatcaggatctggggtgtggggagcatgtgtaatctgagaatgcgcagtattgtatttccttatttgaagaaatgggaaaacttttttaaaatgagtggcacaaagtaaagcatgatacggtcttggctggtggtttacaagggatgggaagcacatgggtctagcagttagtagcgggtactgctgtttaatagcactgtgtgctgctacaaacttttaatgtacatatgctcttatttaagcctcaaaaatccctgtaaggtaagtactattgtcatatgaagaaacagaacagaaaggttaagaatcatgttcaaggtcatcacagcaagtgtgtgagtagatctgggctctggacccaaaacaagcctccagtcttagctaccttgcactcatagtctgttatgaatcaagatcaattttatatgtatcttaccttctgcaaaaaagagttttatttgtgtgcaactggtatgacattaccccacaatcttaggtacaccaaaaaaatcacacttttcttcaaatccaattaagagaggcttcaagttccacttgcagagattggtgaggagttcaatatcagtggtcattgcaggagtccttttctttttttctttctttttttttttttttttttttttttttttttttttttttgagacagagtctcgctctgtcgcccaggctggagtgcagtggcgggatttcggctcactgcaagctccgcctcccgggttcacgccattctcctgcctcagcctcccaagtagctgggactacaggcgcccgccactacgcccggctaattttttgtatttttagtagagacggggtttcaccgttttagccgggatggtctcgatctcctgacctcgtgatccgcccgcctcggcctcccaaagttctgggattacaggcgtgagccaccgcgcccggcctgcaggagtccttttccaggcacacattttgcttagaaaattctgagacctcaaatccccctccatcctggtagtgctgaactgttcactggccaagcctgcattgcctgtttcagggtgaccgatgacagtgtgcatctctccatgctcctcttggcctccgtggtcctttctggggctcctgaggccatgactttgaggtgctggttcctaagcgtccacatgtccactgttgtcagaggtttctaccttctcctcctggggagcttcatagatgtggaacctggtactgatgcagacacagaatgccacatggacacagagcttcttggggggaagggaagtgtacctttcattccttcattataaatttatatgaacttagttaatttctctgacaaattattctgtctgtaaatggcaacaagactcagaataactgactttaagccattttattagtgtccagtttacatttctcagtgaaaatatctagttgtctaaactgggatagcctcaattcattacttgtactatccctgtgaacttgggtaaatgaattgagttccttacgtctctgtttcatgttttgcaaaatggaaataataatagcatctatactacagagggccctgggagatcagctgtaacaaagacactgagttgtagaaagtccgaggtgcatttggggaatggcaatggcaatcattccggttaggttggtgcaaaagtaattgcagtttttgccattactaatagcaagctggaggggagtgtacaggtgggtggggaaaggctagaagtgtgtaaatcctcttttacagagtttggactcacactggccttctttccagttttattaactggagtttgtgttctgactcagacgtgtactgaaatccctctgataaactattttgtcctatttaggatgcgaccgactttgagtggagcttctggatggaatgggggaagcagtggctggtgtggcttctccttggccacatggtagtgtctcaaatggccacactgctggcaagaaaggtatgattatatgtgttgttaccttttaagtgtgtttttcctttgcttcttgtgaagaaagagtccaagctaggaatcggaagacttggatattagcactgggagcctggaaaaaatgataaagttgttaacaatcaatataacatttaagataaaagttcatagttcatatcctgcacttgctttctccaacttattttcaggcattgaatataaaggttgtagtgtaaaactaaccatggagggtggtggtggtctttaagatcacttctaatcaaatgatcaaaaagttgcctgtggttgagaatctggatgagttcacttgcaaattcagaagaaagttgatgatttacttaagaagtgggaataattttaaagtcaagtagtttatgctgctgtcactgttttagatgggaagtccagtagcattttgctcttgccttgggctggcttagagaatgagagattcttcaaagtggttatttgaaaactacttttatgtgaggcaggattgagaccctcttcacaggtctagctaccaagggacctgatatactgccaggaggatctttctgtcacctgggggccagggtattgcccagaggcctctgataaatacttcttgcttgctatagattcctgatggaggaaaaagtctgtgcttggaaatttaccgaataaaagcaagacacaaccaaaacctgatttggaagtcaacctaggaaaaatgttttgattctcagaggttcccgcaggtgataaaactgaagtagaagagaaacagaaaactctggagattgagaccagaaagtgagatgcagaaataggatgtcctgtggttagagatgcgcacctaacttgggccagtttctgactctttcctgaaaattggcgtttcctgggcttgctcctcaccctggaagataggaaatcccaacagcatattaacttcttcttgaatatgatactgattttttttttgtactcaagtggctgctgaactggcaaaatccaaaatattagatgttgtcagatctgagtatattttaaaatttcatttaactttgtgagcagacctaataataattttttttgttcctaagctagtaataaatatatctacctcagccctcattaatggttttctttactcccacaaatttctgtttagtttttttttccccaagaattcaaaacttctggaaatttaacattttaattcgtaacaaagttttcccatccatgtgtaaatgacttattaccataagtctcagttttcccgtatgtaaaataaatagcttcatacctgtttttctttacctctgtgaggggaagatgatgtactttgaggattgtactaagttaattgcatagtggaagagtgctagacattgtattactcatgtttggtccttggttcgattagctttctaacctgagcaaaggttttcactgcatcttcatttatggtcttagtgcatttttgttgcttataagagaatacataaaactgagtaattttataaagaaaatgaacttatttagtaatttatgaagaaaaggaatttatacagttatggaggctgggaagtcataaaactgagtaattttataaagaaaatgaacttatttagtaatttatgaagaaaaggaatttatacagttatggaggctgggaagtccaagtcaccacatctggtgagggccttcttgctgacatcgcggcaatcctgaggcagtgcaggagatcacgtggtgagcatgatagctcaggtctcttttcctcttcttataaagccaccagtcccactcccgtgataactcattaattcatgacatggtttggttctgtgtccctacccaaatctcatgtcaaattgtaatccccacgtcttgcaggaggagcctggtgggaggtgactgaatcatgggggcagacttcccccttattgttctcctgatagagttcttatgagatctcgttgtttgaaagtctagcactccccactttgctcattctctcttctgctctgccacggtaagatatgtttgcttcccctttgccttctggcatgattgtaagtttcctgaggccttccagtcatgcttcctgttaagtctgtggaagtgtgagttaattaaacctcttcttcataacttacctagtctcaggtagttctttatagcagtgtgtaaacagactaatacaactgatgaatgaattaatccattaatgagggcagagctctcatgatccaattgcctcttaaaggctgtacctcacaatattgccacattggggattaaatttcagcaccagttgtggaggggacaaacattcaaaccacagcggttgtcctctgtaaaataggatcaataagatagtattagttttttttctccctttaaaatatgatgagcttcattggttagacatttcatccttaaaagtaaagatgaaacatggaaaagtgggacaaagagaaagcataaaagaaatggttgaagtaagtttaaatatgtcagtcattgcaatcaacataagtggattctcaaaaaagatgaagattgtcagactagatgaaaaaaagaaagagaaatagaggaaaacaaaaaccaaaacagagctcagagaggctcttcttagctagatatccttaaaacagaaggacacataatttgaaagtaaaaggtatgaaaagatattccaggcaaatattaaaccccctctccctctgacaaactactggtgcagttttattaatagcaaagagcattactagtgacaaagagggctgctgtttaataataaagaattcgtttcttattaggaagatattaaaactctaagtttatttgcttcaaaatatataaagcaaaaagtgatcataaacataaagatagataggtctattattgtagggagagattttttttctttcagtagttttcggggtacaggtggtttttggttacatggataaattcttcagtggtgatttatgaaattttagtgtacctgtcacccaagcaatgtatactgtagccaatatgtagtcttttattcctcacccccacaacctttccctccaaagccccaaagtccattatacattcttatgcctttgcgtcttcatagcttacctcctactcataagtgagaacataggatatttggttttccattcctgagttacttcacttagaacaatggcctccagctccaaccaagttgctgcaaaagacattatttcattcctctttatgactgagtagtattccatggtgtatatataccacattatctttatccactcattggttgatgggcacttagattggtttcatatctttgcaattgcaaattaggctgctataaacatgcaagtgcatgtgcctttttcatataatgacttcttttcctttgggtagatacccagtagtgggattgctggatcaaatggtagttttacttttagttccttaaggaattcctatactgttttctatagtggttgtactaatttacacttctaccagtagtgtgaaagtgttccctttttaccacatttacaccaatatctattgttttttgacttttaattatggattaataattatggaaattaagttgaaaagcaataaaaacaagatctacttttgtcaaactagaaagtatacatatacttatctcacaataattttcaagatgaattaaggagttaaaatgaaaatcaaaagtattaaacttttagaaaatatgacatagaatattgatgttggcacagacagagatttttttatacaagacacaaaaagtgcaaattatagaggaaaacactgataaatttaactacgctaaaattaaaaactttttatctaatgacacaatagaaaagtggaaaggcaagtcactagtggagaagtaatttgcaaactgacaaaggattggcatatggaataaatttcataaaaaagacaaaatcactcaatagaaaaatggtacaagatatgaagaggaatttgtagaaaaggaaacataaatgatgaataaacatgaaaaaatgttaaattcattagtaatcaaacaaatgcatcttaaaactacaataagataacattctatgctttctagtttggcaaaaacaaaacaaaaatcccctgatatcagtgttagctgcctgaactcatacagaaagggtgttgaatatatatttgtataactacttagtaacacattatatagtaaagccaaagaggggcctaccctacagccaccagtgctatgtgattttttttttccgcctttacagacaggatctcattgtgttgcccaggctggagtgcagtggtgtaatcatggctcactgtaacctccaactcctgggttcaagcaatcctcctgcctcagctcctgagtagcttggactacaggctgtgacaccacacctggctaattttaaaaactttttgtagagacgagatcttgctgtattgcccagactggtcttaaactcttggcctcaagtgatcctcccatttcagcatcccaaagtgctgggattacaggcatgagctactgcacctggccggatatttcatatatttttaactgaacacatggaagaatgaaatgatgggcagaaggaaaggtgggagttgccctggggacactgtgtttttcatctgtcctccccacgtctctgggccatacacatcaggacccacatggcctcctctgatgggtctcctttgcctctcacccttgttcttgttcctccttgtttgcttcctgtagatcagtgtttcttaaatttttttcagtattgtccccagggcacctttctagataatttttttccctgatcatctctcctctgtgaaattttaatactacagatatcctgtttatatctcttcatgtactgtgcgtatgtctgtgctttatgcataaggagtaaggttttctagcccctgataactgacaagtaacctaaaacttagataaaatatagtactaatcttctacaaatgttaaattattaaaaaaataatagagatagagtcttgctggtctcaaactcctagcttcaagcgatcctcccacctctgctttacaaagtgctgggataacaggcgtgagccaccatgcccagtcattactaattttaatttccattctatccttaggtctagcctacaaaatctgccccaccccacctcgtttagaggagatacaacccttgttgagaatgcatgactgatattaataacctgttcctgattagatgcccctccctctttccaaacctcctccacgttcagctcctgtttcgcacctgacattggcagaaatctagctatattaggatatagatgtcccttcattttatttgcttgtacctttgagttcttgcttctcctctcgtgggaggcagtatttggtgtggttgagagcactagggtcaatccctgcattggccactctcaagctgtgtaaccttaaacaagttcctgaatatctctaaggctgcttccacagttgtgcaagcaggatggcactgctggcttcgtggagttgtggagagggtctgataatcaaatgtttttcagagttatgcttgcacatgaggacagcccaatagatggtgtctgctgctgtcatctgctggcatttgctcctgggagcagtttatggtgttcaagaatggaggtgacggtcttgagattccaaaatcctcaagggcataggccatgtctagcatccataccaatgttcccatactgatggtcttttcaagcttgtcttgggtcctgggggaaaggattgagaaacacagccccttcccttggggagtcacagttgagtgggaagttaggaaagcaaatactgctcactcttctgtacctgatgttgttggctgggcacgttactatgggagaaggtgtaggtctcacctgccgttctggtctcagagcaggcctccgagaaggtggcttttgagctgtggcttgaaggaaatggagtttacttatttcagctttctgcatcttgttaccaggcaggggtggacaggtggactaggcttcttctctgcagagcacatcttatccaatatcagtaggaggtattcctttgcatttttcttggaatgaggcagagtgagcactgagtcatctccctctgtatgtgcctctctcatcctctgggtgaccacgggtttgatttgtgagacagctggtgggccgggttctgcctgtggctggggcacagtgctttctttgtctgagtttgcttggcccttacataagtatgaaccacagcgttggcctcattagctctctgctttcaccacctggactaagtgttccagatggccttaattcgggtagttgtttttggtacttactcagagtggaagatttaggctgcagttgtccttttttctccccattctctgaggcatcctaaactataggcaacactatgcagggacaggctttagcagttcttgctgttgtagccttaagccctgaaggattctagcctcctcctttatctactatctaatctcgtctcttccttggctcattccacctcctcccatggagaggtgacaggttatttttattttcaaaagcatgatctatcttttttttttttttgccatggtaagaaataaaactttccactgagttccttggctcagttaaacaccctttccctggataaggctctctctttgggttttggtgagacttcatcaggagccagtgcccctggagggaaggctgaatcatggctttcagctttggctgtgcatttgttatgattggattggatgtcacgggtcagacagttgcctcctttcatgaacgccaactgtggcctcactaccacctgagacattgtgttctctgccctcagaaccaaaaaatacccccgtgtgaactttttgagaagactggcctggtgtagggttgagggtgggtgctgttgctaaccacagagccgggttctcactgtgcctctgacgggagaacccacatcattagcaattgactgacaggctgagctcatcaggcgcaggtaatgcaaagggctgagaagcctgacccatggtgctgagtgagatgagttaaccaacctctggaaggctgcagggagcagggttcttttccaggacagtcccaaatctatccactgaatagaaatctcatgtgctaatggttttcctggaatcagccccttctacctccatcagtgcatgtctaaggagggatgaaattccttttacgtgggcctgctggcctttgctcccaggaaatgggatgcagttgttcagactgtgggatgggtgggttgtatttttctgtttggggagattatatatacatatgtatgtatatatataatacatatatatttcagtagcagctgctattgattatgtagtatgtaataaattgtgtcatacataagattgattgattccctttattattttccgaataatgctcccattgagtggtttcttggcagatgtgcaaaaagaattaataggcagggacgtctgataatgttgccaacaggaattctgaccaaggctctacactttcactcctccctacagaggtaaactctaaggagggaacccaccaggcataccctattatcacttggcacccttggcacagaatgagctgaagtagaaacagatggtgtgagaaggggcattgtctggcagtttttcctgactccttatgaagaaggttaagagtatggatttcaaaagaaaggagggcaaatctgtagtcttttcttaagggcactgacaccatccttggagctctgccagctcaactggttattctcccgggagactctgctggggtgatggatagaagcctctataacaggtatccactttcctggattggtacctgtgccccatcagttgttaactattggagatttcccccaacagaagtggagttgttaagagatgctgtgagtagcaaacaggtaataggcagtgagatgtgaaatgtctcttccattctacctacattagcaaaacagccattgtttataaggggttaagtaggacaagtagagactttggaagacagtaggttttcacattattgggttccaaagtccacattttactgctattttcttgttttttcttagtcatgatctcaaggttaaatcccaagacttgggaaagcatatccatctacccagctatccatccatgcaactattctctccatccttccatccaatagttatgaaacacgtgatatatgctaggcactgtgctagattctgggcttacattactgtaatctaaacaaggcaggagtttagcctattaaggagactatcaagtagagtcagaccccattttgagagtggttcagtgtagactcagggagcagaggggaaggatgcctgcttaagtcaaccagggttagtaagatctatgtctcatcaaaaaggccatagtgttcagtctggctttgtctccactgctgtaaaaatagagtatactttcttatttttcatcagccttttaaacacttcccctcttccccggctttctgtttcatctcctattagaaatggaagaacctggaataaagaccattgagtgagggtcagagtagttccggtggggctgtcatcctgtgctccagcaagctcatctcaagcttcaggtcactcatgctttgataccttttaaaagagcatgataaattcaaattaaaaccacaatgagatgtcattacacacttaccagaatggctcagatagaacatagtaacagcaccaaatgctggcaaggatgtgaataaactggatcacacatgcattgctggcaggaaagtataatgctacagccatgctgaaaaactgttttatagtttattatagaactaaatatgcaactaccttgcaccccagcaagtgtgatcttgggcatttatcccagagaaatgaaaacttatttttacacaaaaatctatgcatgtgtgtttgcataagttttatttgtaatagccccacattgcaaacagcctagatagcctccagtaggttaatggctaacaagctgtggtatatccacatcatggaacactactcagcaatgaaaaggagcaaaccattgatacagcaacttggatgaatctgcaggaaattacgctgagtgaaaaaagccaatctttgaaatggagaagaggttactggttgtcaggattagggatgggggtgatcagaggagtgggaaggaggtaaatgaggtataaaatggcaacacaaggaatccttgtggtgatggagctgttctgcatttttaccatggtagataccaaacctatacatgtgataaaattgtatagaactaaacacacacataaattaatagaagtgaaactagagaaatctgaataagtttggtgcattgcagcaacatcaatatcctggttatgatatttgtggttttaaaaaatgtgccataggaagaaactgggtaaagtatacaagggatgtctcttgtatgtatatgtgaatacaactatctcaaaaatctgagaaagaacattacataaaagttgtatgcaactggaatctgtaaatcagaaacatcacaatccaacattgaggccatgttttacctatacactttatgtgatcaatgtgattctttgtcttctttcaagtaacaagtaattcccaatcatcttcataatttgaaccttgtaatttaaatgaattgggctattttggtgtttaggtgggtttttaaacttgagtttgacgtacagtatgtgtgtgaccaaatcttgtatgtctgctcttattaccctgagaacttggggaaaaaaatctgaaagcctttctagtgatgagtcagaagtgttgttttggaacaaaatgcaacacaatttttttttttttgaaaagttaaaaaaattctggcctggttgatgtcagaagcttaatactgatagttaagcatttttacttaagagagaaaaaaggttgataaatacataagcacatttggagtagagatggatgggacagggctatctttaggcctttgctgatgaaactggcctttgaaatgcttagaaaaagctcttctgctgcccaaagaagcaggccgtccatgctgctgcccaccctgctgggccatgtcacccttttatcctagaaccctcttcatagtgcttgagatctaggtatgtgcatgggagggatcgtggttgggcagctgtgccctaagggctacctctataatggggactgccctgccatgatgccagttggattgcaagacatgggaggctgattctgctctagcaggattttatttacttgtttgtttgttacttattttgagatggaattttactcttgtctcccaggctggagcgcaatggcgcgatcttggctcactgtaacctctgcctcccaggttcaagcgattctcctcttgcagtattttaatggtgttttggggataggattcattccaatagcatttttatagacaaagtatgaaaatcaacattttagtgggattctaatatatacaacagtttcgtgtaggtgattctttttgcattattcacatcttttcattgcctgtgcatcatgaatgtatatagtagagttgcttgtacttggggagaatcaatgggtaatattaagatgggtagagaacatgaggctcatgtgagagcgtgtcctgtgatgtcttagaacagtattaagtgtcgtctgcctgtactgtttggcagtagggaaacagtgggggatgaatatgggacaaatttttctgccccaaggtggctttggagaccactgttaaattcatcatagtctctcaagtaaatggggtttacacagcactatcaagtatttcctgaagcttctttcagcattttccaagttgaagcagcttcagtctgtggtaagttcccaaacgaatcccagcaaacaggctttttccaaagggatcaaatagcacttaataaaaacgtaactgtgtctatgtatgtagccacacatgcacaaaaaagaattccattggtaaatgctgtaggtcatgttggaaaagaagcccctttttttcatttgttaaaactacctcttaaaatagtctttggccatgtattccttataattggactctgcccagaggtgagggtttgaagcaaatttatgtggctgttttctgtgggtagtaggatggaaaaatagtaaaaatgaacttcacatttctctggttttcttggaacttaaaaatggctgatctagtctcatatttaaaatgttctcttgagctagagtataggtttgggaaagaatggtaggtaggcaatattttgaaagagttagcatcaaagcacgggatttgcaatttacactccacacctgtcttgccctgaaaaaagtctttgtttccacaagacgacctaagttcgggcacttatcacttttcaattcggtggttcctgggatccacattttaaaatgcatgcccgtgagacatcacatttccctatgggaataacaactgtatttgtagagtccttcctgtgtatccaccccatgaaggagatactgttattattccagttttgttttgtttttgagatggagtcttgctctgttgcccaggctggagtgcaatggtgcgatctcggctcacagcaacctctgcctcccgagttccagggattctcctgcctcagcctcccgggtagttgggattacagtcacctaccatacctggctaatttttgtatttttagtagagatggggttttgccatgttggtcaggctggtcttgaactcctgacctcaggtgatgcacctgcctcggcctcccaaagtgctgggatatcccagttttatatatgaagaaatgaatccacagagatggagtcatttgcctcaggtcacacaggtagttatgagacacaagcatttgaatttaggcagttagacttcaaagcttgaatcattaaaccacaatgataccttgcgtctcaaagttaaaacattgtggtttttaaggatttccccatcaggtctgaccaaggttatatcataaagcaaagacatgttaattcatctacttattcaatgtgataactataaattagttgatgattagataaaaatctgtgattctcctaaaatgggaataaatgtatcaatcaggtagactatgcaaagtcctcaatagctcataaagcaggtaagatgcaatttttctatgacataaatttgactaatcaatatgcaaaaaatcaaaaatgtaaaaaaaccctacatatttaaaatctctggcttagactttggaaagtcttttgtggtttggatggcccagttttcttaataggtcttcctagaaatgtgtactaatactttctctcaccttcacttctgaaggatgctgtatgtaggatgtggtccagttggcatttttccagctgtcttctggcttccattgtgtctgttgaaaagtcaatccaatatcttattgttgtgtgacccaggggtctgggtggctttggttgaaggcaggagagtggttacttgcttctgggtggagctgatgggactctgggggttaatgtggaaagtccctctgaatcttgtttgtctgtgttgtaccaaaattcccagggcagtgataagagtttctttattgggtaattaaacgtgatcctcttacatgtagaaccttcaatatcacttccatgagctcacttctgtttattttcctccctcccctcttcctccctgtctctctctggatgggccccaccatttgcagcacagaccctggattctcatgctctatgggatgtgggcctgctggtgtgtgctggggacccctggtgtggctatggttttgctccataccaccatctctttctgcgtggcccagttccggtctcagctcctgacgtggctctgttctctcctcctcctctccacactgaggctgcagggtgtggaagaagttaaggtaagtgttttcctgttaccattgggaatccagagaaggcccctttggctttgccttgatcccagtagacaccttggttttcagacaagagatgattgtagaactgtgatggggctccccatagtggccgtacagggttgctacaagtgaaccctagtggtgcattctgcaatcctatcattcctggctgtgttttagccctgtgagattgcccagggctggccctgtaccatctctcccagtttaggtgggcatgtgggttgccagatgtcacagggccagagggtcaggaacaaagagagaagaaacaaacagatgatttactaaaaaacatctggagagtgccctacaatttatagggaacgcacacatcactcaactcatctgatggccacaatggccctgtggtggtaagtcaggtctttttcttcttcctagttgatggaacagatttatttattcatttgtagagacggagtcttgctctgtcacccagggctgaagtgcagtggtgcgatcttggttcactgcaacctccgcctcctgggttcaagcgattctcgtgcctcagtcaaccgagtgggtgggatataggtacctgccaccatacccagttaatttttgtatttttagtagagatggggtttcaccatgttggccgggctggcctcaaactcctggcttcatgtgatctgcccaccttggcctccccaaagtgctgggattacaggtataagccattgtgcccggccaggaacatatttattatctactcatgtgacccagtggaagctctttcaatttaggtagtgaaaacaaagtgtttagccccgaagggcacagaccaagctttcatttctgtaaacccagaggcattttgacagactcaaccacctatccattgttggtgctaatagaggaggacactgggctcaaaccacacttctttagggcttttgtttgcattagtaaaatcttattttataggcacttaccttttagctttattttttttctcagtcacaataacagtgcatttttactttatgagtgcacatcagacttgacccagagaattggtggatgacagacagactgccttctgagttgagtttcctgtgccttgctgaggcgattgcacctatcagcaaattcttcttgtactacattttctgatttctgttgtgtgttctctgatcatctcctgggcagtggctagcatcccctggacggctctggactatctgtttctgtctttggtaactggagtgacctagccctgcttatgcaattgaagcttaggcccctcagcctatctcaggcccactcaggctgtgtgaggttccttctctcacttgtctgttgaatacaccctttacatgttcaagttggagctgccaaggtctgtggctgcaggggagtaaaggcagagtctgtgtggaactctcaaccatccagaagtgggagctttcttttaaggagaaatgcatggcaagaacacaagtccaaggccccagctccagggtctggttctgggcactcagcttcagagcccttcacttttggggccagttgactctgagaacagccagcctgagagttgcgcagcttggaaaacatcaggggtcatatgcccagggcaggaccattgatgtttcccaccttcatcgaccttctccttcctagcccggttcccaaacactgcccaactggcaggagctgtttttttgagtcaggccaatctgcttacctttccctttacacatttacatatgtttatgctgtctcttggaaccaaccttctcatcatccctgtccaccggattctctttcaaagtacagcttagacctcagtctctaaaggtaagaaataaaagagggccacagaaaaacagatcagttagtgtccgatactgctctgagagctgctggctcttacaaactggtaaacaataaaacagtagcatgtaagtgaccaggtgtcacctagagctttggggacactgcacacacctatcccttcctctaaccccctaggatctccataggcacattcaaaatcttgggcagtgttgggtattctttcttcaatcactgtgggactggaactcctgtggtatctttttattcattcattcagtcactcattcattgatccaggtgacaacacttagcattcatgtgccctgcatcaacacagtgatgggaaggaacatgatgggaaatgtgagatggatgacctggttcctagtctattctattccccatctcttcctactctgaagctggagcagtcatttaacctctgagcctcaatctcatcatttggaaaacagaagtaataaatcctcttccttcctcatgggattgttctgagagtcaaacgggataatctatgttaagtgattttgtgaaaattgtagcattttgaaagttcaagtattttttgctgtttttagtctaccttcatttttctcactctcattaatgatgtggggctaggattttaagcacgtatgtcaaaatctggacttatgagagtatatcagataatcactccgttttaatgaagatacttcccagaatgattaggcaaccatttaggcaagtgtgcttaaaaacagatttacagtaaaaataaaaacaagctcatacctaaccttttggggacctggcaagtgtacaaacagaatctaattccatttatcatttatttggggacaattagcatcagttatagatgttggaggtgaataaatgttcatttgttctgcaaattttacagtgatttgaaaaacactgaggaaggagatcatgtgattagaaactagctgggtttccatgcttttgcacatgtggttctcctgatatgattatcctcttttcccttggtggctgctaaagtcttgtacaagaagtagaaactctgttcagtggttggtttttctgtgtacagctttaagagaccctgatggatcaagttaattactttctcctttgacccaagttctatttctcgtatgtatttccataaatagtttttctcactaaatgtatttttggaaaacatggaaaatgtagaaaaatatagaaattagaaaatacttcataattttactccccgatattaacattttattgtatttccttctcattttttgttccatgcatatttttgcacaggttatttcttgtttcatgctctattgtaattgcatttttacacatctacgtcctgtatgagaatttaacatattgagggcagggacttttttttttttttttaaatatttgtctgtaaagcttattagacaaatgctactcaactaaatgtagagccaaactgataacaaaagaggaaaacgaaaaatacattgaagacagaaatcccatgggacattttaagcccctctttgttatctgaattgttgaagaagctgtcaaagtatccactggatgtagctaatctgcaccttatgccctggatgtatctgatacatgcctaactgggaaaaccttcgttatgttgtgtcagacctaatgctaggttaacattagagatgtcctttttcctactgctcattaactgcttgctttgattaccaatgagatttacctggtgttcattggttctcgactgccttttatggcacagctgctctgcctgaagaagaaattgccttcccagagccccctgggattctcagatgacggtggccctgctggccagcacctgcagtgggactggacgatgtccctgctggccactcaaaggttgttctctccttttgattttgtagagaaggtggtacaagacagaaaacgagtactacctgctgcagttcacgctgaccgttcgctgcctctactacaccagcttcagcctggagctctgctggcagcagctgcctgctgcatcgacctcctactcctttccctggatgctggcctatgtcttttattatccagtcttacacaatgggcccatcctcagcttctcggagttcatcaaacaggtagagcccgctggggatgggattgggattctatagcttaagcctttgtcgctgttgctctggtcttctctgactcttgagtcgttttgttcagaggtgcccacagatttacaacacatactattagttctcatgaggttttttgtaatagatgaaatacatatgagaaatgagcctttaaaataaagtttgacccatcagatatgtcagctctagggggtcccaccttgattttcagtgaactctggcaaccaggattaatgagtagggcacaacaaggagtttgggagttggtatccactgtggcaaagtcccaaggaaagaaaaaaatttgattatgatgctattacttgaaggaatagaaaaggaaactgtctaagctgttgcttggcaaatagtatgtttccttttatattcacaagctgcttaagaaatagtcctgccatagcctgggagctgttcagggtgacctaggtgtgaaaacagagtggagttgaagtaagttcgaaggcagtggtgtgtgttcatgtctggatccccctttgtgcccaggcccccgcctgccttcctcggacggcatccttgtctgaaatgccatgttaagctacctctgttgttcccccctacttcacttttcccccttgtttagaactttcttttttttctgcctcctcaacctacctctagtttcatggaacataattgctaagttaattcacctaaggaattagtaattgaaaatgcctaaaacagtgttctcaagggatattctatccctcaccaacaaaacaatcctcatagaggagagaataacatgtacgtgcatacacagacatgcatgcacacgcagaacacatacccacgcatacgcacacacctggaagggcagggcaagcagcagtgttgcacatttctgggcagcaacatgaaagttgctccctgaaaaaggagggttcttagaaatcttattttgtcctcaaagttccactgaattatgcattgtattcaagaatatatttttgcattataacaataacataatgttctaaaatttccagtgaaagtatgtaactttttatatctctagaaatctgtaagtgaaattgatattctagacagatatgtttagtctatggtttctcatacctcggtttgggatcgttcttttgtcatgaaggaatttaaaatctgcatttgaaattgtgtttaaaattattgtgtaaaagagatggtttaatgatggcagctgatcttctaactcaatgatttgcaaagtgtggttcctggaccagcagcatcagtatcgccagagagcttgttagaaatacaaattctcaggtcctctccaacctcctgaatcacagcctctagggataaagcccaggaaggtggtttaacaggccctccaggaggagggtgggagtaaaggtaaggtgggcacagcatagggtgggttcctctcttttacaatctccttacctttgtgaacttttgaattattctcagtttgccagccaataacttttggaccaaacatccacacacagacacccctctcctgaggatggctggtaattttcagagaaacataaactaaatccattagaaggaaacagattattttcctaacttcctcctgtatataagctttgcctgtatgctctgtactttgttattatgcaaaataattgtttctgttatttctcatctcctttttcttctttttttttttgagacagagtcttactctgtcacccaggctggagtgcagtggtgtaatctcagcttactgcaacctccacctcctgggttcaagtgattcccgtgtctgagcctcctgagtagctggattacaggcatgcaccagcaagtccagctaattttttgtatttttagtagagaccgggttttgctatgtttcccaggcttgtctctaactcctgaggtcaggcaatctgccctcagcctcccaaagtgctaggattacaggcttgagcctggcctcccttttcaaattgtgccttttagggtctagtaagaatattagaggcctctagcagggtcctgtgtcacacagaggcacgctttaagattatcttccacctaaatccttagccaagggttctcattctcttgagtctcattctggggaagtgaaggggcaggttgcttcctgtaggggccaggtatagacactctgggttttatccatgtcttttccttccctctctctctcttcttttttaaccccttctaaaacaatagcaattgctgacagcagggaacttgaaagggcaaattaaaacctctatgtttgggggagtattcatagaatagtcattctagaaaaggataaatgttcagtaagatatagggcaaatttaaaaagccaggaggtttctgcacttgctgaaggtggctgtggggaacttcccttctgtggggaagggggctttaaaggggcagggggttaaaccaaaaagcttatcttgcagtgaaagggttctttcagagaagccaaaaaggaaaaggctgggaggtggagaaagaaagctagttggaagaactagtaagtaagatttgctctgaatgaatgcttgaatgaatgcatgcatgaaatgccttcagctataaggattggaaatattgaaatgcatggttcttagactggcaggtcaatgcataaaaataacgtagagcaggagaatgacgctgcaccaccagggggcagcagtgccccattgtggaaaccaaccccagcgggaaatcttcacccagtatctgcaaactccaaaagatcaaatgacaatgttagttttaggcatacacctggagaatgtgtcttccacccaatttacatacacaaaatgagggaggtatagaagcgttgtcttctgcaatgtaaagcatgtgaaatttgcataattagtcacgaacaggtaaaaatttgcctctgtgccttaacttgaaggctatttctggtggcatttagagttttaggaacatgggcctgatttgtttttctctcacgtttctgtggaactcggataccaagtcagcggtgagacagggatcctgggggacttagggaagggaaggacatggtgtttacttgcttagcctgaagcctggggccactacgtcttgaagaggttgactggtgtggtgtgggcactggggagaagagcagccttagggtggtgggccagggactcttccttgctgggcactgtgctctcccaccttagagaagccagtggtcaaatagggaatttggcatggaggttgagagcaaaggtcctggagcccaccctccagggtttgaatccctgctgtgcttcggcttgagagtgcttgctgagttacttaccttacttatgcctcagtcttcttatcagtgaaatgggaagaataatagtgcctccctcaggattgctgtgaggattaaatgattgtgtataggtaatgtggtttgacaggttaatactataaagtgttaattcttactcttattattatttgagacagagtctggctcagttgcccaggctggagtgcagtggcacaactttagctcatcgcaacctccacctcctggtatcaagtgattcttgtgcctcagcctcccaagtagctggaattataggcgtgcaccaacgcacccagctgatttttgtatttttagtagagatggggttttaccatgttggccaggctggtcttgaactcccgacctcaggtgatccgcccgcctcggcctcctaaagtgctggggttacaggtgtgagccaccatgctcggcctcttacttttattattgtgatgattggccagaaagcaagtgtaattctagggtagtttaggtcagaagtgagaccctgggtatccagtctggtaggcaggcacagcagcaggggactctgggccatggccatgcttgggctcagaagaggccagtgtgctggttccatctatttgaagagagacccaggcagctgctgcaggaaagggatgggggcagtccaagagttgctgggactggcaagagctgtgcaaggcagtcaatgtcccagaagctttgtttagtacttggcatgggctctggttctagagagcacctggaatcatgctaattgtaataaaatatactaggtgatcatttagtctgagccaggctttatacgttctaacttaaaatgtttgagatggtctcactctgacacccaggttggagtgcaatggtgcaatcatagctcactgtagctttggcctcccgagctcaagtgatcctcccacctcagcctcctgagtagctaggactataggtatgcatcaccacacctggctaattttttaaaaatacttttctagagatgaggtcttgctatgttgcccaggctggtctcaaactcctggcctcaagtgattctcttgcttcggcctcccaaagtgctgggattacaggcacacaccattgtgcctggccattctagcttgtttaatcctcacaacctgtgagagagatactgtcatgaccactttacagacagggaaacagaggcaaagagaggctattacaatgcagatagagtgaagggaatcaagacatgagccttgttgcgctgacttggtgtgtgagaggagttagagggggatggagtgtggcctagtggacatgaaggtctggaggctcaagcaggctgaaccaagtaccagccttggtggcagcaacacctgcaggccccacttgctgttctgggagagctcactggatgttgctggccttggtctggatggctagcgggtgggagtaatgtgggtctgattagggaatgatttgttaggagtaggggtatggtctgtgaccagtataaaggaatacaacaactgccacaaggcctcctagacccaagcagagagaagctaataagttagtggcccaggtggcccagttgaatatctgcctctggggagggcttttgtttggtgctcacaaacatatgtattattcgtgtatgaagaaaaagaacctttcatctttgagaactgtcatctttaatcatcagaatatatttgggagaaagagaaaggcatagctattcctttttatgcaatttgcatgaaattaggttttaaagtataatgcattttgaaatgcactttgcagatgagttaatgtgtattttttagtgatgcctgaacttcacaatttccatggtggcagtttccagtggtctaaaggtttggcagtcccctaggtttgaaatgtcttaaatgaaatactttgcatgcaggcaagagagccgccctgcacattagatgagctatatatggtctgtctgttcttcctgctgggttgacaagggacaaattttggatttttttttttttgagacagagtctggctctgtcgcccaggatggagtgcagtgctgcgatcttggctcactgcaacctccacctcccgggttcacgtcattctcctgcctcagcctcccgagtagctgggcctacaggtgccagccaccacgcccagctaatttttttgtattttttttagtagagacgaggtttcatcgtgttagccagaatggtctcgatctcctgaccttgtgatccacccgccttggcctcccaaagtgctgggattgcaggcgtgagccaccatgcctggccggattttttaaacaaaagacagtcaactagattgcagatgtaaatggactgtaataatgatatgaccctaaagaaagatgaaaaaccttttgtttttttttttttaagtaaaagcaaatagaatgaaagttggattgtttttcttttgctgtgttgtttatttgtaaattttttttttttttttttttttaagatagagtctcactcttcacccaggctagagtgcagtggcacgatcttggctcactgcaacctccacctcccaggttcaagcgattctcctgcctcagcctcccgagtagctgggattacaggcacctgccaccacgcccagctaattttgtatttttagtagagacagggtttgaccccgttggccaggctggtcttgaactcctgacctcaagtgatccgcccgccttggcctccctaagtgctgggattacaggcatgagccaccatgcctggcttatttgtgcaattaataaacatttctgttgcttggagcagggaggcagtcagcaccagaaaaggagtgttgcagagaaaagtctagtccttttggtcctgtagtgacatgtaattatgccttattatacctggtagggaagttttagcttgtgaaaagtaggtaagtcattattaagaagccaatgcatgacaaaatgtacctcatgatttttcttaattacagatatttgtgtcattttagaatgcacatgtttgaggagggaaaggaggcctttgaattcaccttgaaacgtgattgcctggagctgagaggtgattgggtgtcagcgatattttcttgattatcttgggggctgttggttctggcctcctcctggctcccttccagtccagctgctatctctccactccctgggatggggctccataccaaatgctgcttggaggcccgaggtacagtcctggccttcagggaacctgagctttgggtaggttatgctgaagagcctgtaggccatatgcacagttggcttatttagaaactgtagacatttgtctgtgtgaagattatctgctgtcaacactgcttttgaggccattatcacgttcagctagaagacttgcttctctccaagagtttgagcaggttgggcacagtgatttacacctgtaatcccagtgctttgggaggctgaggtaggaggatcacttgagaccaggagttcgagaccagcctgggcaacacggtgaaactcagctctacaaaaaataaaaaaaaatcagccaggcgtggtggtacatgcctgtagtcccagctgcaggggaggctgaggcaggaggattgcttgagccaaggctaccatgaggtagggtcacatcattgcattctagcctgggcaatagagtgacaccctgtgtcataaagaaaagagtctgggtgccaggaaagacctgtccattggtctagagtgattttgctgcctctacatgtcttacatgcctctacatgcctctacatgtcttaaccttggtgtgaactcctctagcctctacagactaatggatagtatgtatcttagtccattcagacggctataacaaaatatcataaactggatggcttctgagcatcagaaatttatttctcacagttctagaggctgggaagtccaagatcaagacactgccagatttgatgtctggtaagggcctgcttcctggttcacaggatggtacctgtcactgtgtgcttttgtggtggaaggggtctaactctttggcgtctcttttataagggtgctattcccaaccatgaagaatgccctcatgacctaattacttcctaaaggcaccatctcctagtaccattaccttgggggttaggatttcaacataggaatttttggagggatgtaaacattcaattaataatattttgcccctgccccctgaaaattaatggcctccttacatgcaaaatacactcattccatcctaatagccccaatagtattaacttgttccagcaccaactcaagtgtctgaaatccaaagtctcatttaaatatcatctaagtcagatgtgtgtgatactcaaggtatgattcatccttatgcaaattccccttcagctgtgagcctgtgaaatcaagctctgtacacccaaatccaatggtgagacgggcataggatggacactccaattccaaaaggtagaaattggaaagaagaaaggagtaaaagctcctgaggaagtccaaaaccttaaggctcaggaatcatcatgtttggctcattactctgccctccaggcccactagggtggaggtttcacctctcagacacactggggtgcctctggacacatggtggtggggagggggttgtgcctcctgcagatcacccaggccagaatcttgagctggtggctctactggtctggggtcatgagacagtgccaccctcatggctctgctgggccctgcctctgtgcagttctttgtctgggccccatggctctctaggcattgttagaaatctaggtggaggcagccacaccccctcacagcttttctggttgcagtgccaactacactgcactggggcccacaggagccacccttggggcagccaaggagtgtggtgacggggagtggggagcagagcccacaatgtgaggcaggactgggcagtgacagcccctcctttgcatctgcaattgctttgtcccccaggcctttgcactctggcctgtgatgatggtggcagcagagagggtcaaaatattcacagtattataatgttacattactttttctctgactgaaaagaaccaattttaattgtaaaacataactaaaatctcaccatccaaagattaccactgttgacatttggtgtatatctttccagcctttcattattttatgcacattgaacacaaatagttttcatgactgaattctctttgtgatcactcttccattgtcttggacaggaggtcctggcttctgtttaaacagctgactaaccttatcaggtggttggttggccacattcttgatgttctctcctgaacaggctttctcattcttgatagtatggaaaggctgagagttttccaaatctttaagttctgcttcccttttgattaacaattttgtctttaaatcacttttctcctctgctgttttactataaacagtcaagaggagccaagttgcaccttcaacactttgcttagaaatggctttagctaaatatccaatttcattactcacaaattctgccttccacaaaacactaggatacgaacacaattcagccaagttctttgctggttcataacaggattgcttttcattcagttttcaataccatgtttctcttgtctaagaaatcatcagattggcctttaccatgcacatttccaccaacattctgttcactactgctcagctattctttaagaatattgaggctttctctgcagctcttctcctttccttctgagccctcgccaaaatttcccttaaagatccatttacagcaatgtatactgcttaaagcatgcacctccaaactcttccagcttctatccattaccccttccacactacttgcatatttttgggtattttgttacagcagcactcccactcttggtactgattttctgccgtagtccatttgagctgctgtaacaaaatactataaactggttggcttataagccacataaatgtattgctcacagttctggagtctgggaattccatgatcagtgagttggcagattcagtgtctggtgagggcccgcttccttgttcatagattggcaccttctcactgtcttcacacggtagaaggaactagctaactctctgaggtttccttgatgacagcactaatcctaatcatgaagggtctgctctcatgacctaatcacttctcaaaggccccacctcctagtaccgtctctttgggggttaggatttcaacatatgaattttagtggggcacaaacatgcagaccatagcagtgtgtttgtaatcatgtcttcttttgctagtggttattaggtcaaaatgaacttgctttggagagctggaaaagggttgaaaatgaaccaagaagaactcagtacatagctacaaaaaaaatctaagagtgaagggggaaggaaaggagaaataaaaattagtctagcataaaacatggagaagaatactcactcatagaggatgctgggcttcctggcagaagttctgatgccaggcatttggagaagcaggatgaagaaacagaggggtcttgagtacatttgcctctctaacagagagggcccaaatattcacaacattgtaagatcacattactttttctctgatttaaaaaagaaccaatttggctgggtgtgatggctcacacctgtaatcctagcgctttgggaggccgaggtgggcggatcactggaggtcaggagtttgagactagcctggccaatgtggagaaaccccgtctctactacaaatacaaaaaatagccaggtgtggtggtacatgcctgtaattccagctacttgggaggctaaggcacagaaatagcttgaacccagggaggcagaggttggggtgagctgagattgtgccactgcactccagcctgggtgacagagtgaaactctgtcttaaaaaaaaaatctttttaattgtcaaaaataactaaactctcaccatccaaagatgaccacttttgacatttggtgtatatctttccagctttggattattttatgcacattgaataaaagtagttttcatgaccatataatattgaggtacacacatgcatttaaccaacaccctagtgttggacatttgggttatttccttttaacttctcgtttattaaaacaaacgtgaatgatctggcaggtaggtgtttctgcactgaggatttagtgattgactggcttgtaacagatctgctgccatagacttcgtagggtctctcagagcatgcatgcttgaggtaaggattcaaatgaaaaccatcctcagtttatgcccagaaaggggtctgcctggggtcactagtgcatctgtaattgcagttaggtctgatcaatacaagtctgcaaatatccaaggatacccaatcttgcttcttggagaactcaaattctgcttcctgtgaacactaaccagatgaattctccaaagcaattactgttgtttcttaacagtgcagattggtatggctgcataaaatatcttcctgaagtgacctgagggaaacaaaaggcaaaagggaaattcctgttgtaccaattttttcctttttttttgagacagagtctctgtctgtcacccagggtggagcgcagtggtacagtctcagctcattgcaatttctgcctcccgggttaaaatgattctcctgcctcagcctcctgggtagctgggattacaggtgtctgccaccacattcagctaatttttgtatttttaatagagacagggtttcaccatgtcggccaggctggtctcgaactcctgacctcaggtaatccacctgcctccacctcccaaggtactgggattatagatgtgagccaccgtccccggcctaatttacattttaaaagttaaagcaacaagcttttctgggcatagttaaccaagcagatggcaaaagggagaaagctgtttgtgcagatgattgtaatgccaatgagccgaccaaaatttcttagcctggcttcttgttgcgggaggacagttagagagactggaagaatgtatgttagaaaatggaataaaaataaatcccctgctgtgtagctctctctttcccgctgggggcagtgcctgccactctcctggctgcagagggtcccacagcaccctgatgatggaggagagagaagctaaggaggtacctcacggaatgggcctttatgtcatgagccctgatagtcaaatgctaaatcaagctcatttcctctaccggctaatgtgtgcagatgcagcttgacatttagcattagtctgtcctctgcatttcaagggagctttcagtctcataaaatcttgtcattgtgagatccagaaaacttactgttctctctagtttttctgtatttatatttgtttagtggtataaggctgaatgaaattgaattcacttcaaattttccagcatgtttatgaattctagaatctatgtgttttaagttactgtgcatctctaaacaacaggcagtgaggtgagaccacagaactgggctttaaaaattttcatctgtgttgtccactgtattgagtatgccctcagtagcttctatctgtatctatgaataatcaaaacatccctctcttgcctttggtgtttggctctgagctgtctcctaatgctgccctgtagctggttgtctgggatgccacatgggaaggatgggaagacacacatggaggcggctaatgatagatattaactaccaagtatccagtgcttcttgtatgcctaagtacttcacatacttcatcatatttaatcaccacaacaatgttttttactttaggaggaaacccagactcggaaaggttaagtaacttgctcaggatcacacagctgtgtagtttgtggtagaatttgatcctgatcctctgactctaaagtccattttttaaagaagaaaattccttttacaacaacatcaaaaagaacaaaatatttaggactaactttaatcaaagaagtacaagacttgtacactgagcactacacacattgctgaaagaaatttaaagaagacctgataaatggaaaaacagcccgagtttatggagtgaaactcaatattgttttgatggcaaagctacccgaagtgacttattttacttttgttttgttttgttttttagacagtcttgctctgtcacccaggctagagtacagtggtgtgatcttggctcactgcaacctccgcctcccaggttcaagcaattctcctgcctcagcctcctgagtagctgggattacaggcatgtgccaccccatgcccagctagtttttgtagttttagtagagatggggtttcaccatattggccaggctggtctcgaactcctgacctcaggtgatctgcccacctgggcctcccaaagtcctgggattctaggtgtgagccaccatgccccaccttattttacattttctaaagtctgtattcttaactgttatgctctgctgcctactaagcaagagacttgttccacatactgtctgccatgtttcaaaaaacaacttagggtgaaatgacatgcccacacatcattttcccttgctctcagcccatctttttctctttctcttctaccagtcctgtgtctcttgttgactgggacctgcttttgccagcctcagacatgagtaggtgatggaggaattcaggcagggtggcacctgtagcccgaaactccaaattcccagtggggaaaatacactgagtgctgccctccccgcttgggtttttccagggctgatgctggagtggagggatcagtgcagaacgtgtctttggctcttggcactaggctagcttgttgacccccaacccccattcttattttgagacaaatgttcaagctgaaatacgattcttccaaccaagaacattgagtgttcccaagacaaaccaaaccaaccctctgtcagctggcatagcaataatatttgtgggaagtttatgaaaaatcttatctaagggactgttttaggaatcaaggcaccatcgaatgacctcttttgtttccactttagatgcagcagcaggagcatgactccctgaaggccagcctgtgtgtcctggccctggggctgggccgccttctttgctggtggtggctggccgagctgatggctcacctgatgtacatgcatgccatctacagcagcatccccctcctggagactgtctcttgttggaccttaggtaattgtgggaatcaccaacagtgggatgagccccaatagtccaacagttagcatcagaatggagctggagtgggggtgagcaggggtgcaggtgcctatagcaaaccctctttattattattttttaacctactcctcttgtggccaagattgtgcatgtgagaagtggttgatgtagctgacggaagtgagggctgtgcttgtagtctggggaccaagaatggtggcattcttctctgtaatgggatcctactgaccttagctgggtccacatcttcacagcgtagccaatattgtgtttagcagtagaaggcaggagttgctgggggcagctttgagttcattctaagagagaatgctccaagattgagttgttccacagtcttccttgttctttgtgcataaggtattaaagaatatgaggctgggtgtggtggctcatgcctgtaatccaagcactttgggaggctgaagcaggcagatcacttgaggtcaggagtttgagaccagcctggccaagatggtgaaatcatgtctctactaaaaatacaaaaattagctgggtgtggtgagagacacctgtaatcccagctactcgagaggctgaggcaggagaatcacttgaatctgggaggcggaggttgcagtaagccaagatcatgccaccacactccagcctgggtgacaaagcatgactctgtctcaaaaaaagaatgagtgtcaggatcacacagccataggtttgagtttcagcttcaccaatgactggtgtgtaaccttggcagtttacttaacctctcggttccagcaccctcatctgtaaaatagggagacttagctttgtggaataataggaggatattaggcagcgctgcacattgagggtgtaccttgtacactgtctcgggatagaataaatggcgtgtgtgtatttccctctgtagatcccctttccttatctaccctttcctgtgtgtctgccagggaggtggcatggaagtcttacttcctcagcagggctagtctccagtataggatttgtctgtggagaaaccactgttcttttattcctctggccaaaacagcagagcccacgcccttttctgaataaaatctcttcacttccttgttctctctccttttgaggactcccgcagtggctgacttctgcctgtgctctgacctccagcctgtagctccaataactgtgtgatcctccaggcagatcaagctgttccctgctgagggcaagagtacaagcccgactccttctttatctgtttaacatttcatagatcttcttaaacaaatcttgattgttcttggtatcacacgtacttaatcagaatgtttccaaggacgaaacctttaagattgaaaaaatgctaagctagtttaatgatagtctctttcttccaaacaaaactttttatagtttggagttgctaatattgtaaagttttaatgatacaattagacaaacagaatatgattaaatgatagcttatactaagtcagatcccagttgtatgggatacaaactaagggactgtttcagcttgagggtttttaaactaaaagtaatggaagacacaactcaaaatggggcttaaacaataaggaagttattccatataacaatgatacttaagatcggcactaggggtagtaaattatgtgactctgatgtcaccaacacaccttttgtgtgtccaccattcagcttaagaactaaccagaatcgtagaagcccttagtttgtactcctaatcccatcagcctctattaccctctctgaaaagattacctgaatattgtatttatccttttcttctttttctttgtacttttaccacagttaaatccttaaaattgcatatgttaacacctcgtcgtatgaatagattcatgcttgttatgtatgttctgtgacttggttttcttgtttaacattgtttttgagaagcattcatgttaagacatgtaactaggtagcacttattttcactgctgtatggcattccagtgtatccatatacaagaagttatttgtccgttctacatatacgaggacacttgagttttttacagggttttgctattccatataatgccatttctgtgtctcttggagctcatgtgtaagggtttccctgtagggccataactttcaaactctttggcacattacccacagtaagaaatacattttgccctaatgctaaataacgagttgatgggttcagcccaccagcatggcacatgtatacatatgtagctaacctgcacattgtgcacatgtaccctaaaacttaaagtataataataataaaatttaaaaaaacaaaaaaaaaacaaagaaatacattttgcattacaggtgtgtgcatgagtgtatgcatgtctctgtgtgtgtgtaaactctcacaaagccatactttaccttgaaccacctgcaatgaatactgactgatattttcggttccatattattctattttaaaatattggaatattttaaaatatttgaatctctgaattgggtgagtcactatccagagtttgtcaagcattgttcaaatatatatgtattctgaaataagtattgtgggcagtatatttgttcagatttataagaaaaattattttttaatttggcgaaaccaatttatgctcttctcggcagtgtgtttccattgcttgaaattctcaccaacacttgatactactcaaagcaatttatagatttaatacaatccctatcaaagtaccagtgacattctgcacagaaatagaaaaaaacccctaaaatttgtgtggaaccacaaaagatcctgaatagccaaagcaatctgagcaaaaagaacaaagctggagtcagaacactgccagacctcaaaatatactacaaagcttgtagtaaccaaaacatcatggtactggcataaaaacaggcacatagatcaatataaaaaaatagagaacccagaaattcacgtatcttttaattttgaaaatctggtgggtgtgaattttatctcatagttttaatttgcctttccttggctactaataagtttgagcatcttttcataggcttaaaggactttggtatatcatttcttaattatttttgagacagtcccactctgtcacccaggctgaagtacagtggggcgatctcaactcactgcaacctccacctcctgagttgaagcaattctatgcctcagcctcccaagtagctgggattacaggcatgcaccaccgtgcccagctaatttttgtatttttagtagagacggggtttcaccatgttggccaggctggtcttgaactcctgacctcaagtgatccacccacctcggcctcccaaattgctgggattacagctatgagccactgtgcctggcccggtatataatttctaatgaaataactgttaacttttgcccatttttctaatgggatttctgtctttttcttgtggattcataaaatttatattatttaaaaaaagtcatatgtgtagttgcaaatattgacatcttttggtttgtggtttgacttctaatgtttttatgttgtttttttgacagcataaaaggctttattttaatgtagttgcatttagtcatttttatttatcatttttacttttttgggtctttcaaaaataattatctcctactccaagatgataaaaatattctccactttcttctaaagcttttaaagttaaaaaaatctttagttattgtgtacatttgcatcatagactgataaaatataaaccattcaaaataattttttaaattgacaaataataattgtacatactcatggggtgcgtagtgatgttttgatacatacaatgtatggtgatcagatcagggtaattagcatatccatcatcacaaatagttatcatttctttgtgttgggaacattcagtattttccttctagctatttgaaactatgtaatatattattaactctagtcatcctacagtactatagaacacttgaacttattctacctattgtaattttgtatcttttaacaaatctctccctatccctccctttccagcttctagtattttctcttctgttttttcacttctgtatgaacatttattagcttccacctatgagtgagaacatgtggtgttaactttctgtttctagcttatttcacttaacagaatgtcccccagttccatctttgttgcctcaaacaacaaaatttcattcttttttatggtggcatggtattccatggtgtaaaaataccacattttcttttttttctttttttttgagacggagtctcgctccatcgcccaggctggagtgcagtggcatgacctcggcttactgcaacctctgcctcttggtttcaagtattctcttacctcagcctcctgagtagctgggattacaggtgcccaccaccacacctggttaatttttatatttttagtagagacggggtttcaccacgttggccaggctggtctcgaactcctgacctaaagtgatctgcccacctcagcctcccaaagtgctgggattataggcaggagccaccatgcccagctttaaataccacattttctttatccatttatctgttgttggacacctaggttgattacatatcttggctgttgtgaatagtgctacagtaaacatggggtatagatgtctcttgaatataatgatctccttttcgttggataaattcacagtactgggattgctggatcatatggtagttctatttgtagttttttgaaggacttccatactgttccccatagcggctatactagtttgcattcccaccaacaatgtgtaagaatttacttttctcttcatcctcatcaccatttgttatttttttggccactttcataatagtcatcctaactctggggtgagatgatttcccattgtggctctgatttgcatttccctcatgattagtgatattgagcttttcacatatttattgaccatttcttttgagaaaatatctgttcagatcattagcccatttttaaatcagattgtttagtttgctgttgagatgtctgagttccttgtatattctggatattaatcacctgttggataagtagtttgcaaatattttctcctattctgtaagttgtcttttcactctgttgtttccttttctttgcagaagctttttagtttgatatatcccatttgtttatttttgcttttgttgcctgtgctttagaagtcttatttataaaacctttccctgaccaatgtcctgacggattctcctaatgctttcttctagtatttttattgcttcaggtatacacataggtctttgatccattttgagggtgagaggtgggggtctggttccattcttctgcatatgggtatccagttttctcagtaccatttgttgaacagattgtcctttccttaatgagtgtttttggcatctttgtcaaaaatcagttggctgtagatatgtggattaatttctggattctctattcttttatattgatctacatgcctgtttctatgcatgtaccatgctgttttggttactacagttttgtagtatattttgaggtctggcagtgttctgactccagctttgtactttttgctcagaattgctttggctggtcaggatcttttgtggttccacacaatttttaggtttttttcttctatttctgtgaagaatgttactggtattttgataggaattgtattaaatctatcaattgctttgagtagtattgtcattttaacaatattctttcaatccatgagcatgggttgtttttccatttctttgtatcctcttcagtgttcgtatttctttcgtcagcgttttgcagttttccttgtgaaggtcttcacctccttagttatttcacatttttttagctattagaaatgggattgccttcttgatttctttagttcactgttggtgtatagaaatgatactgatttttgtataattgtaccctgcaactttactggatttgtttatcaattcaaatagtttttttggtagagtctttaggttttttttctttttttttaactctctgtgttcaggggtacgtgtgcaagtttattacataggtaaatttgtgccatgggttttttttttttgtacagattatttcatcacccagctattaagctgagtactcattagttatttttcctgatcttttccctcctcccaccctccaccctgtgataggccccagtgcatgttgttcccttctatgcctccagctccaaccatgtccctgcaaaggacatgatattgttcttttttatggctgcatagtattccatggtgtatatgtaccacattttctttatccaggctatcattgatgggcatttaggttgattccatgtttttgctattgtgaatagtgttgcaatgaacatacgcgagtgtgtctttgtaacagcactatttatattcctctcagtatatacccagtaatgggattgctgggtcaaatggtatttctgtctttaggtctttcaggaattgccacactgtcttctataatggttgaactaatttacactcttaccaacagtgtataagtgttcctttttctccacaacctggccagcatctgttatttttggactttttaataacagccattctgactggtatgagataggatctcattgtggttttgatttgcatttctctaatgagcagtgatgctgagcttttttttccccacatgattcttggccacatgtatgtcttcttttggaaagtctgtttatgtcctttgcccattacttaatgagattgtttatttttttccttgtacatttaagttctttgagatgctagacattagacctttgtcagatgcatagtttgcaaaaattttctcccattttgtaggttgtctgtttactctgttgatagtttgttttgctgtgcagaagctctttaattagatcccatttgtcaattttgcttttgttgcaattgcttttgtcctcttcgtcatgaagtctttgtccatgcctgtgtcccaaatggtattgcctagattgtcttccaggatttttatagttttgggttttacatttatgtctttaatcgatcttgggttaatttttgtatgtgctataaagaaggggtccagttttagtcttctgcatgtggctagccggttacccagcaccatttattgagtagggaattatttccccattgcttgtttttgccaggtgtgttgaagttcatatagttgtacatgtgtggccttatttctgggttctctattctgttttgtcagtctatgtgtcggtttctgtatcagtatcatgctgttttggttactatagccctttagtgttatttgaagttgggcagcatgatgcctccagctttgttctttttgcttaggattgccttggatatatgggctcttctttggttccatatgaattttaaaataatttttttctagttctgtgaagaatgtcaatggtagtttgataggaatagcattgaacctataaattgctttgagcagtatggccattttcacaatattgattcttcccatccatgagcatggaatgttcttccatttgttttgtatcatctctggtttctttgagcagtgggttgtagttatacttgtagctatctttcacttccctagttagctgcattgctaggtattttattccttttgtggcagttgtgaatggtaatttgttgctgatttggctctcagcttgactgctgttggcatataggtatgctagtgatttttgcacattgattttgtatcctgagactttgctgaagttgtttatcagcttatgaagcttttgggctgagacgatggcattttctcaacatcgataatgttacctataaatgggtagttttacttcttctcttcctatttggatacactttatttctttctcttgcctgattgccccagccagaacttccaatactatgttgaataggagtggtaagagagggcatccttatcttgtaccagttttcaagaggaatgcttccagcattcgcctattcagtatgatgttggctgtgggtttgtcatagatggcttttattattttgaggtatgttcctttaatatctagtttattgagagtgtttaaccatgaatggatgctgtattttattgaaagctttttctgcatctattgagataatcatgtggtttttgtctttagttctgtttttgtaatgaattacatttattgatttgcatatgttgagtcaaccttgcatcccagggataaagcctacttgattgtggtggataagctttttagtgtggtggtggattcagtttgccagtattttgttgagtatttttgcattgatgtgcacaaggatattggcctgaagttttcttttgttgtgtctctgccaggttttggcatcaggatgatgctggcctcatagaatgaattaggtaggaatctctccttctcagttttttggaatagtttcagtaggaatggtgccagctcttttttgtacatctggtagaattcagctgtgaatccatctggtcctgggctttttttggttggtaagttatttattactgcctcaatttcagagcttcttattggtctgttcaggaattcagttcttttcctggttcagtcttcggagggtgtatgtgtcctggaaatgataactttcttctagattttctagtttgacatattaataatattctctaatggttgtttgtaattctgtggggtcagtggtaatatcccccttgtttcttattgtgttcatttgaatcttctctctttattagtctagttagtggtctattttattaatttttttttaaaccaattcctggattcactgacatttcaagtctctaatcctttcagttcagctctgattttgtttatttcttgtcttctgctagctttgggattggtttgttcttggttctctagttcttttacttttgatgttaggttattaacttgagatctttctaactttttgttgtaggtgtttagtgctataactttccctcttaacattgccttagccgtgtcccagagactgtggtatgttgtatttttattctggttagtttgaaagaacttgctaatttttgccttaatttcatcatttacccaaaagtcattcaggagcaggtcattcaatttccatgtaattatatggttttgagtgaatttcttagccttgattagtaatttgatagtgctgtggtccaagagactatgttatgatttcagttcttttgcatttgctgaggagtgttttctgattatgtgatcaattttagagtatgtgccatgtgatgatgagaagaatgtatattctgttgtttttgggcggaaagttctgcagacatctatcaggtccatttgatgtagtgctgagttcaggtcctaaatgtctttaattttctgtctagatgatctgtctaatattgtcggtggtgtgttaaagtctccccttattgtgggggagtctaagtctctctgaaagtctctaagaacttgttttatgaatctgggtgctcctgtgttgggtgcatatatatttaggacagttagattttcttgctgagttgaatcctttaccataatgtaatgcccttcattgtcttttttgaacttcgttggtttaaagtctgttttgtcagaaattaggattacaatccctgatttttttctgttttgcatttccgtccatccacagttttacaatggaagcattgtattgtctatccagagatcagtactgataaactctcaatacttgtccttccacatcatttttttcctatagttctttatacacacatttatgttttcccccaaatgagcttatactatatatatatatatatatatataattatatatatatataattttgtagtctaagattcattttagttaaatgatctctatcctttcacattactaaattttcgttcttgtttgatacccagacagtaatcatattttactaaggtcctttatatctgctttggccaagctggtatccaatctaggactacacattggatctagttgttttgttccttaagactgtcttatttagcaccatccttttttatgacaccagcttgttgaagggaccaggtcataacctggcttcttataatgtcatttagcatattcctttatcccttctgtttcttataaactaaaagttaaatcaaaaaccttcgtgggccaggtgtggtggctcatgcctataatcccagcactttggaaggctaaggcgagtggatggcttgagtccaggagtttgagaccagcctgggcaagatggcaaaaccccatctctacagaaaatacaaaaattagccagggtggtagtgcgtgccagtagtgccagctactcaggaggctgagatgggtgaatcacttgagcccaggaggtcaaggctgtggtgagctatgatcgcaccactgcactctagcagcctgggcaacagagtgagactctgtccctcgcttcccctccgcacccacctcgctccggcaaaagacaaagcttcatagattaaagaggttaattatttttagctacaatacctatcgtatcacctatgaagtcataagatgatacttaaacttttccccaattcttatgagaaattttaaatatctagaatgtttgaaggaattatataacaaacacaatggatctaccatgtagatccaacagttgttaatttttgcccccgagtaacattctcctacctaactacaattacatatcacacttgataatagtacttttctaatatctaatatctagtctgtcttcacattttcctagttgtctccaaatatattttaaagctattttgtcaacccagaatcagccaaatgcgtcatttggtttcatgtctattagtctacttcgatctagaatagttcaaccatgttttaaaatgatatgactttttgaggagtccagacttattgtcttatagaatgtcccacacactggatttgactttttaaaattgcgttattcttaaatttgttcttctatcccatctgtttctgtaaactgaaagttagatctagatcctctagagtcctgatttaataaaacaatttttttttgcaaaaataacttcatatagaatgccgtatgcttcatattgtatctgtgggatgcgtataatgtcaggtggtcccccctgtttgcattgctaagtcaaatcacttgcgtatggtggtggtgccagatctctcccttgtaaaggtacatttatccctttgcaattagcaagcaacatgtgaggtgttaattcagtgctatctgaatatcttcttccccaataacctggaaaatagtgaatagttttagcattttttggtgaaacttgcttgaatcagttttttgagtgggagtttgaaatgctgattttccaaatctatcattatgcttgcatttgatagctggcattcttctgtaaagaagacttttccatcataaactggagctgaatacagtttatcataaaaagccagggcaaatgtgtaatcgttcctctttaaacatcattttatagaataaggagttcagtgaaatattttccttcaatagtagtgtcaaataattttatattttacaattcaatgtagtaattttccttttggatgctaaaattgtcccaaatttggtcaagctagcttctgtgttctcttgatgagcctttatttgcctctgtttccttagtttctggaactgaaagatatcccagtgcttaccttatattttccttagccctgtattggaatcagccaaatcttcaaagcagccttgattccttttagtgggggaattatatttaggagccaagatccgagtctgtccattactacaggggtgttattgttcggaggcctgaacatttccagtgagtagacctggggaatatggttttataaaaacatgagttttataaaatgtgagttcatactgagattttaaattcagatttaacattactatgttttttcttagcaactttgattttatacttgtgccttttctctacattaatgaagatcatagtttctaattacatgagcgtattatttgtggtgacactatgagtagtttcaaaattataatgctcaacattttgacaaaaaatcactgaatgacagttaagaatcatttcagttcttttttctcttagggtggaggtatactgagtgctctgtattcaaaagccatttgaaataatgctttttaatgtgtgttcatattactgatttgatatttggttaaattcttctaattttgaatttgctttttgtctttttgatttatcagtcctattttttatatttacaagttctctttgatgcttttgtatctgtgaggtcttatagtttcttttccttgcatattctttcaagtttacttatgttttcaaacatgataaacatatttatcttacattctatagctggtaattctacatctgcaatctttgttagtctgattatccattttacttctgtcagttctcacccatattttgggatgtttgattgtgagcccatgttaattgctgctttgtccttgggaattctttggtgtctgtgtttggaatacattcatccagagaatatttaggtttatttctgccaggtgcttggagttgttaccaacgtggtgctgcttaaatttctggcttggggttttgaggggacacacaggcaatgggaattttgggctttggaaatctggatttatgtgggctgtcactctaacctcctatgtgtatgggctcccaggactgccacctgtccccacatgtggcttgtgaaaagcaaagcctaggtctttgcagcctggcaggttctaccagggtaaagacatgcacgaccgctcgcccatttttctgctcttgctttatatatatatttttggtctccaaggacttttccaaacagctcaagtatatatttgaaaaagatgctttcacatatttcatttagcatttcttaggtgttctccattggcatgattttcaagatgggacagtctgttatattgccagaaatggaaattccactatacctgtttttaagaaggaagaaatctcacaagaagcatctccagcagcttccccctttatgtaccttgtggccataactgcatcatctgggtcatatggccatattataatcatcccatgattagttgtaaccaggaatttcttccaggttactatgcggaagaggttggacacgggaatgaaattccctttccaatggcaaggactgggggaagagagttgtttgggaggcagccagtactttgtattagagcaactacttctgaatacaaagtagcagtgtagtgtttcaaattggaaaatttgaaaagtagtataataggcagccaagaaaatagaagatttaaatgttataattgttttattcgactcttaaaacaattaatttgaggcttatgatttgtagagtgaccaaatatcccattttgcagtcctattctatatctgttttcctgatatcattattaatagtttctttcattctcaaaagtgtccctgaaaagtgagcatccatggattttggtatctgtaggggttctgggaaccaatttcccagggatgcgactggagctcaggagtgagattggcaatggagacaggtacgtgggaactgttgcacacatgtgataactgaggccacaggagtaaaaggacttccttgaaaaatgtgtagaatgagaataaaggagggccaagtatagaactttagagaatgttaaaatttaagaggtgagccggaaaaggagtcagtaacgaatgagaaggaatgttaataaacaaaggaggaagccagtggttttgtgaaggttgcaagaagaaagctcaatttatcagaggttgaaaagaggctgcgtaagaggggatttaagagagtctttcattttggcaaatgggaggtcataattgactttggtcatggttgacgttgttcattttgggggactaaagaccagggctacagaataaatcaaaggtgaaaaaatagaggcagaagctaatatgctgctttagttgtgttaaatgatgacttaactgccacgtagtcttagatggccttgctatcacatagcccagtgggtcctgactgcatctttttaccttctggtggacctgccatttccaggctgctcctcagggtctccgtctctccaggctgccatgatgtggagtatagcatggcaaacatcccctttctttccagcacatgggcaccttcagcttcaaggttttggtgctaatccttcttgagatgtttcagaaagataaaataagcataagggggttataaggtttgcagaaggcatgtgagctttgggccctggtggcagcctctgatttccttctgaactaatacagagatactgtaatttttttattctgtcacttttaacctctcgatggcagggctctcattccactaaggcccttttttccatccaaaagttgcagttaagtgtgagacagcagcacagacagtaaaagatgtctctttgtcttacatggaagaagatatacaacagatccttcatctctaaatctcaggactgggtaacattctaccctgtccaggaatgaccccctctgaacaccccaagctgagtgagagctgctttagagatgcgcctataccactgcctctggggtctttctcctgcagcactcacagcgcaggtgcttaatgagtacttcacgtgcaggttcaggtgaagtaaaatttcacagggactctgcctggcagttgacatcagattggtgttagtgtgagcagccagatatccagatgagtgattgatacaagattttgcataaggcagcaaagggaaatcatgcgtcgtacattattgctccaaaaagggattgctgcaagttaacagaaatagagaatataaatagaggttgtttctcgtgggattgatttgatgtggttaatcaaaggagagaaatattcacatactccatggaaggtgtttaatcctctcctggtgggggtggaaaaaaacagtggtggctgcttgtctgtcagggctccgttgctactccctgggattgagaggacattgggagctccatggcaacagggtgacatttgtttttctttcatttcccttaatcctctcctggagatatcaaactaaaattttcttcccatttatttttctctcttttcagggtgatgttgatgatgattattaattttaaccttctccttcaatttctagtgagagttagagctgctgtaatcaggctctcaggtggaggccaggctccaggaagatcttcctgagcactgcctgggcagggcattgggctgtggatgttgtccacaccagcgttgtaccagtctacatggggttacctctgcccccactgtggctggcccagcacctgcattagacatatcttactggaaggatagaactttagagaacactgatatttgacaggtagatagaaaaagagggctatcaatgaatcagaaggaatattaattaatgaggaagtaaacaagtgtcttgtgaaggtttaaaaaagaagaaggtacacaatttatcagaagttgaagagaggccaataagaggggaatgaagaaagtctgtttcagttttggcaaatgagtcgtgattgactttggtcatggttgccactgttcattcgggggaatatagaccagggttgaataataatcagacgtgagaaaatggacatagtttgggggaaattttaaatgtttctgctttcagtaactaaaagcaatcagaaactagtgggaaatgtgatagtgattatagctttctgaaggccagtgggaggctgaattctcttaatatgcaggaatgttcaggaagagggtactgagcagctcctttccatgtcggccgagttcaaacaaggtttaagtttaagcaaggaaatgttattagatatagtcctcaaggggtataccacagactggacaccttcaggaagacacacactatctcttatacagctgaaaatacacacatctctttccccaagtaactattcaagtccaggctctcagtgggctcaagggagtgtccacatctcctggaatttggccataatgttaatatcctacaactgtgggctcagttgtagagttagctaccattgacacctttatattaaatagaaggggaaagagatgggaatgaagagaaatactagctaaaatttacatgtaaatgcattacacagcaaataagaaaatacaggtaatcgtttagagctaatttttatgtttttcattaagaaaactttttaacttgtaaaactgatatatgatgtacatattttgggggtatatgtggtaatttgatacattcatataatcagagtaattgagatctccattaccttatttacctttttaaatactaggaacatttgaattattttcttgctgttttgaaacatacaatcaattaatgttaactatagttaccctgttgatctattgaacagcaggtcttctgtcttctaagtgtatatgtgtacccattaatcaacctcttttcatcctcccctcctgctttcccttcccagcctctggtaaatcaccaatctactctatcttgatgagattcacttttatatctctgacatgtgagtgagaacatgcaatgtttatctttttgtgcttggcttagttcacttaacataatgacctccaattccattcatgtttctataaatgacagaatttcattcttttttatggctgaataatattccactgtctatatatttcaattttttaactccattcattaatggacatttaggttgattgcatattttggttattgtgaataatgctgcaataaacatggggagtacagatattgctttgacatgttgatttcctttccatggggtgtgtatccagtagtggaattgctggatcatatggtggttctatttttgttttttgggggcagtttttatactgtttttcatagtggctgtagtactttacattcccaccaacagtgtatgaggtttctcctttctttacatcttcaccagcatctgttatttttttgataaaagccatcctaactggggtgagacgatatctcattgtggctttgatttgcatttctgtaatgattagttatgttgaacactttttcgtatattttttggccatttgtatgtcattttttgagaaatgtcttttagatcttttgtccatttttaaatgggattctttcttttttttgctgtcgagttgtttgagctccttgtatattctggttattaatcttttgttagatagtctgtaaatattttctcccattctgtgggatgtctcttcactttgttgattgtttcttttgctgtgcagaaactttttagcttgatacaatccatttatctatttttccttttgttgcctgtggttttgaggccttgcctagaatctttgcccagaccagtgtcctggagtattttcccagtgttttcctctagcagtttcatagttgcaggtcttggatgtaagtctttagtgtggtttgaattaatttttgtatatggtgagagatagaggtctaatttggttcttctgcatgtggttatccagttttcccagcaccatttattgaagagagtgccctttgcctattgtatgttcttggcacccttgctgaaaatgagttcactgtgtatgcatggatttatatctgggttctctatcctattgcattgatctgtatgtcttttttttttaatgccagtaccatgattgatttggtttctgtagctttgcagtatattttgaagtcagatagtgtgatgccttcaacttcgttctttttgctcagggttgctttggctattcggggtcttttgtagttccatatgagttttgggattgttttttctatttctgtgaagaccgtcattggtattttgatggggatagagcagtttctgtgcctgatcagggggtttgtgactctccccttcattctgtgttctttttgtcttcggttagtacttctgctgttggggttcttaactctggtgtgatccaaattttgattcttcacaggtctaagccattgcaagtcctgctgttgtcttccattaaccagtagacatggcaatactaggtgataccccacaaaatcccctaagtttcatttatattcctcctgcctccattgtgtaggagtaactcaatttccctttggcagtaagggttaggcctctcagcttgtactataactcctctttcacttgttctcctagttccatgaggaaccccaaatggctgggtgatagtaggttgttttgatttgacagaatcattgtttcatcccctggtggaagcacttctttgctgtgtggtaagacctctaaccaagcacatcacagagtttcagggatgggaagaagatatcttaggagtaggttaagaggtgtaatagtgaggtaccactccctcttccactctttgaatactgactctacatatttaggttatgggtaagagcaccatatggagtttgctggctcagagcacattctgtatcccgtgggatagaatctcaacatcacatgatgatgtatatgggaacctttgatagactattctgtaaggctaactgcttttgaatgatgggataagactagtgaatcccatagcccatcgtctgacttcatttgctacaaagtgaggtcattagacaaaagtgatgttatgtctgataacatgacagtgactaagatggtcagtatgtccatggatggtgaaactggcagacacgttggtgaatttggaaagcagattcacatcgagaataagggacgactctctggcccctccaaaacagaagaggtctagtgtaatcagcctgataccagaatatggaaggtcatagaaaaccggcaaattagggactcagctgtgctagtagccaggttaatcttggtgagaggctgtccacattgttgatcctgtgcaaagctttcattgctgccattgcagctactttggtgatgagcccattaggacggctgtggaaagaggctggctgatgtgcacaggccatgctaccttgttatttagactgccgggcccttttgttgagtatttacatgggtcacaaatatctcccctgggctcattttgaggtgttcatttatatgcctctttcctgattttaaacgtctccttattaacatttatccaatagaattccttccacaatcctaactatcccaggaaactattggacactcccatgaatcagttttagattcttacagacaaattggccaatggcatgtaccacttgaaattccacccactgtgaggctttttccttgtttgctgtcctttggggccatctcacatataaggttgcagctgttcatttccagcagattccatcatatcttgggcagtcatcagtgaacagagctgtttcccctcctctaccaagtcctcttggggccttaggtgtgggatgagagaaggatagccacatagcaggagtcagcatattgggaggaggagttctcttttcctgcaacttaattgtgacctcaggattctccgtgtttgtgtgtgtgtgtgtgtgtgtatacacatgtgtatgtatccattgataatggaatgcttcctgatattgtggctaggtggatcagataactctagttgataatggaccactcaggtaacatggttctttggtgtcctgtggtcagggatagctcacctggtgaatgaattagagtggcctgcacagttacatacatatcacctccaaattccgaagaggtctaccaaagctgtgcctctttcttatggatgagtggcataaggtagaccaacttgtcctttacttgtgtcttgaactcccagaaactgctctgaagtgatatacccacatatatatatgtatgtttatttctgatatgctcatacttattaaggcatctggtatacctgccactcctaattttgtaggtcctattggcatgctctgttcatgatttttcttacggttatttggctgttttagggtctttaggtctgtgaactgactcaggtctggaaattgggtaaatgatcatggtggcttaagttaagccttgttcactaaaactagattatttgccagttatataatgacaataaaaataaccgtagtggaaatgatagctagcatatattgagcacttaatctgtgccaaacactgctttaagagctttatattagcctatgtaattctcacagcagccctatgagcagatagaatcgtatcgctattttacagtgaggaaatggagacacagagaggttcaacttgagtatctgtctgtctaaggtctatggacctcatgatcagttgcccttctccaaacatcccagtgaatcagagcatctgaccgccaggaaggccatgtggcttactgtggtcatcatgcacacgtcaccttggggttaagtggcattatttagtctattacttaaggggtttggtgtccgcattgaaataaagaatttcgttgtctcttaacagcatcctcagcccacagagaatggccttggcaacacatttctgagatgcttgtgctcccctcactaatgtatttatttctcaaattctcagtgaagggagtgtcttctgagctctcttgggggcataattagggagtgggctagcaggtcacacatgataaatccactcagacattcttatctcctgaaatcattttattacttcctctcttgacttcccaaagaatttctggcatctcagccccatacatatgggcagctgtggtgtctgggtttccaaactcatacagtcagctccactcccagctgctgcagctggcatgtggaatcctgacttgctggtaagtgtgctcatattgatcattccaccccatctatttagtcttcttccctccatctagattccttagaatcccacatatataggtcagagttttgctaatgtaaagtagaaaaaccttgtggttcttttggagtgaaagccttgtaataggccccttggggcatgctggggctcatttctagacagtgaggcgtgatgagcaggagagatgaagaaaatctgcttctcttgcaaagtaattccttcatgagacttcattaaaagggtcttcaggtaaggccagatcagcctcatctgaaagccttacacagggagaaaggggctgtcgctgctgacaagtgatgttccctgaggtttggggacttgggcttttcttaatcaccttaaatctctgttttagtttttaggagtttcactctttgtagattggtagcccagtctatagataccttgcaagggtgagaattcagctgacattgtaatttaataaagctaaggataaaacttctggggttttttgtttattgagcccgctgactagaagagataagagatggtttttagcagaggccaagaaggtccctgggtttcagtccataccctaagctgagaatttaggaattggagcctgtcattctcctcttactctcattctttacgctctgcttggcagcctacaccatatttcttggaattaaagacatcatgcccttagtagttgtaagttgggttccccagggaggctagtttgtaggtgtttattagggtgttctcttgagattaattcctgtaggaggaaaggggtggaaggagggcctgacagagggaggagccaactgtgacgcagtcttcatggaagctccagtcgattctgtagggagttctgcaggttgggtaattctttggagtggtcccaagcagagtgaggaggctaagcctttctacccccatggcaatcagtccttggatgtagcccaccccagaaaggcttgggtgaggtagctttcctgagtggacgcaatccccagtggaggtaatccccagctgagagtttctgctggtcacttcccatcagctgggacagtgagtccttcattgcctaaggaaatctgggcagtgcatcctagtattccccataatagtgttttgtggaattgtctactcggtcacccagtcttggcttcagtggttgcttctttccaggtgactccagacagtaatttgatgaacaatttcaacactgtgtacctggagcttccagactctcactgttgattagtagctggattttcactgccttgagctccaaagcatcaagacagccaaatctaggttccctagtttttcctgagtgtctgatgctgacgggtactgagtatcagtttcttgaacctatcagtttcttctttggaagtaggagaaaccaactttggatgatttatgcagaaaataagattcattaaaaggaaaatgagtagctcatagaatcacagggctctgaactcagaggactgaatccaggctatgcagccaggactcaaaccccacaatatgccacagtttgtgaggatgccaccccctcctagtgtaacttgaactagccactgcgtgctgccactaatgtcactgccactagagtgtgcttgtccagtggacagggcctattcaaagtgcagaggaacctgcagggactgtgtgatgtggatggagggtaaggaatgaggaacaggagagggactgtggtcaagtttcacaaatgcccatgttgattttagacagcagcagcttgttgaatggcttgagaatctgagttgcaaatgaggcctcatgggagttacataggaaatctgaagcctgctgggcccagagggacagaaaactcagtaattttttttatagaggtgctggtctgaatgtcaagtgtctttgccaaaagagaccttgctcgcttttccaatcaatctttctctgcaccctctggctgtcaagtagttacctaagtgagttttttggtggttattctacaaatatgataatttttcaaattatttgcattttaatgtcagtgaaagtcaagcttgtctttagattttgacaaggatagccctatggctcaccaaagatattagttcaaattgttctttttaatagtatagtgataatagtaatatattttcgtcaccatgaaagtggaaatgattggtagttggaaaaagtatttgttcattgacatcttctccaatttgtaattaagagcaacaaataatctgctagacattttaacacacaataaatatatatataaacagatatacacgtaaacatgtgtatatgtatatatatgtacacacacatatatacacacacacacactttttttttattatactttaagttttagggtacatgtgcacattgtgcaggttagttacatatgtatacatgtgccatgctggtgtgctgaacccactaacttgtcatctagcattaggtatatctccgggtgctatccctcccccctccccccaccccacaacagtccccagagtgtgatattccccttcctgtgtccatgtgatctcattgttcagttcccacctacgagtgagaatatgcagtgtttggtttttttgttcttgcgatagtttactgagaatgatgatttccaatttcatccatgtccctacaaaggacatgaactcatcattttttatggctgcatagtattccatggtgtatatgtgccacattttcttaatccagtctatcattgttggacatttgggttggttccaagtctttgctattgtgaataatgccgcagtaaacatacgtgtgcatgtgtctttatagcagcatgatttatagtcctttgggtatatacccagtaatgggatggctgggtcaaatggtatttccagttctagatccctgaggaatcgccacactgacttccacaatggttgaactagtttacagtcccaccaacagtgtaaaagtgttcctatttctccacatcctgtccagcagctgttgtttcctgactttttaatgattgccattctaactggtgtgagatggtatctcattgtggttttgatttgcatttctctgatggccagtgatgatgagcattttttcatgtgtttttcggctgcatagatgtcttcttttgagaaatgtctgttcatgtcctttgcccactttttgatggggttgtttgtttctttcttgtaaatttgtttgagttcattgtagattctggatattagccctttgtcagatgagtaggttgcgaaaattttctcccattttgtaggctgcctgttcactctgatggtagtttcttttgctgtgcagaagctgtttagtttaattagatcccatttgtcaattttggcttttgttgccattgcttttggtgttttagacatgaagtccttgcccatgcctatgtcctgaatggtaatgcctaggttttcttctagggtttttatggttttaggtctaacatttaagtctttaatccatcttgaattgatttttgtataaggaagggatccagtttcagcttcctacatatggctagccagttttcccagcaccatttattaaacagggaatcctttccccattgcttgtttttctcaggtttgtcaaagatcagatagttgtagatatgtggcgttatttctgagggctctgttctgttccattgatctatatctctgttttggtaccagtaccatgctgttttggttactgtagccttgtagtatagtttgaggtcaggtagtgtgatgcctccagctttgttcttttggcttaggattgacttggcgatgcgggctcttttttggttccttatgaactttaaagtagttttttccaattctgtgaggaaagtcattggtagcttgatggggatggcattgaatctgtaaattaccttgggcagtatggccattttcatgatatggattcttcctacccatgagcatggaatgttcttccatttgtttgtatcctcttttatttccttgagcagtggtttgtagttctccttgaagaggtccttcacatcccttgtaagttggattcctaggtattttattctctttgaagcaattgtgaatgggagttcactcatgatttggctctctgtttgtctgttgttggtgtataagaacgcttgtgatttttgtacattgattttgtatcctgagactttgctgaagttgcttatcagcttaaggagattttgggctgagacagtggggttttctagatatacaatcatgtcgtctgcaaacagggacaatttgacttcctcttttcctaattgaataccctttatttccttctcctgcctaattgccctggccagaacttccaacactatgttgaataggagtggtgagagagggcatccctgtcttgtgccagttttcaaagggaatgcttccagtttttgcccattcagtatgatattggctgtgggtttgtcatagatagctcttattattttgaaatacgtcccatcaatacctaatttattgagagtttttagcatgaagggttgttgaattttgtcaaaggctttttctgcatctattgagataatcatgtggtttttgtctttggctctgtttatatgctggattacatttattgatttgcgtatattgaaccagccttgcatcccagggatgaagcccacttgatcatggtggataagctttttgatgtgctgctggattcgttttgccagtattttattgaggatttttgcatcaatgttcatcaaggatattggtctaaaattctctttttttgttgtgtctctgcctcgctttggtatcagaatgatgctggcctcataaaatgagttaaggaggattccctctttttctattgattggaatagtttcagaaggaatggtaccagttcctccttgtacctctggtagaattcggctgtgaagccatctggtcctggactctttttggttggtaagctattgattattgccacaatttcagctcctgttattggtctattcagagattcaacttcttcctggtttagtcttgggagagtgtatgtgtccaggaatttatccatttcttctagattttctagtttaattgcgtagaggtgtttgtagtattctctgatggtagtttgtatttctgcacacacacacatttttaaatagagactgggtgtcactattttgcccaggctggcctcaaactcctggatttgagcaatccttccacctcagcctcccaaagtgctgagtttacagacgtgaaccaccatgcccagccgatatataacacacaaatgaggtttttttgtttttctttctcctgagacagagtctcactctgttgcccaggctggagtgcagtggcacgatctcggctcactgcaacctccgtctcctgggttcaagcgattctcctgccttagcctcctgagtagatgggattacaggtatgcaccatcacacccagctaatttttgtatttttagtagagacggggtttcaccatgttggtcaggctggtcttgaactcctgactgtgtgatctgcctgactcggcctcccaaagtgctgggattacaggcatgagctactgtgcccaaccaacacacaaacgagtttcaaacagtggtcacttgttgactagtgagcataatagtgcggagaatataaaatagaattgtgctagtatctctccctagccccctctgcctttactatttgccttctgcattttgtccagataatctacaaggatttgcaagccctatgttctttacagactattttctttttttccttttaaaaggtcaccttggcttcagagctttcaacctactttgaaagcttaccgtattatgaacttttcctcatgtggtgaaataatcttttaaatttcattcttttagagtatattttttactagttttaaggtattcctttctatggctttactgtaatttagttaaccaattctctgttgttgattatttaaaattttgcctcattataaataaggctttagtgaacatatttacataacccttttaaaattcacctgggatgatttcctcagggtaatttcctaggtcaaaggcttttgcaactcattgccaaaccagacttgagggaaggtagtgtcatttttctttgttgacatcagcagtgtttgagagaggtggttggtggtggactgattttttgttaatgcaattgatttctatttagaaggctagacatctcctgccacctgccccacccttctctattttctggattctccttccctgctatcctcttagggtgcttgtgaacattcctttgctcttggacagttacaggctcttttttttttttaattctgtaagttttagggtacatgtgcacaacgtgcaggttagttacatatgtattcatgtgccatgttggtgtgctgcatccattaactcatcatttaacattagatatatctcctaatgctatccctcccccaggctctatctttgaatatggagcaagctgcagtcaggggccatctaagcagccaactgtgggaagagcgcaaagggcggagcctgtgggagattctcttgtcgggtgggcgagggtgtggaactctggcctcgtccccagccttttggaactgagctttcccaaaagacaactggggcctcacgggagccttacagggcttcttggaggtcagattgcctgagtattgaggttatgaacctaccgcttatatatatgagtttttagatagcagaaacttttcttcttgaaagattattgtttgaagcctttcaaatatgttcttcctgtttatggaaaaaataccatattaaccaagataccaatcactggatgctaggaataatgggacgatcaggactttgggattgtggggtgtaaaacttgctctacaatgatgtgaccttgttaaaaagcagaatgtttctgcagttgtgtgctggcttttcattgagcttagaataaagccagtctgatcctccttaacaaaacaccacgtggtccggcacctgccaccgtgactcatctcctcccacccttgccccggcctctgtgctcctgcactgtgggcttcctgctcatcttcagaaagagcaagcatggtgccaccgcagggcgcttttatgagctgttccttcatcttagaatgctcttgcctttcgtcatcatatgacttcctgtcattcccatctctgcttaaatgtcattgccccaaagaagctgtccttggtgactcaaagagaaacagacaaccagcgttctgcatcaccagatttttttctgtgcgtaggactcattgccatgtgaaattttcctcgtttgtctgccttccatcccagagtctatgttccatggacataggaaccttagtgaacttgtttgtcatggtgtccccactgcctaaaacaatagatagctaataattgacactccataaatatttgttgaatatatgagtagtgcagcgggtcaggctaaacccctttataggttgttaaaagcaagtatcctcaatagactcatttggggtctgaagatctgagctttagtcttaaccccatatccactaattctgtgacgttgggaaaaccacttatcatctctgaatctcagtgtacttatctgtaaaataagaatcatagtacttacacagagaacctcatatggtggttgagaggaatagctgtgacagtagatgtgcaagctgtctgtaagcttttcaacaaatggacattatctctactggtttattacaagtaattacaggagactaccatagggtgcttccaaagcttggaaaaagggaaaatacagcccactacagagagaagacttttatatcagtgcacgatggattagaaacatgtattttggtgcgcacttgattgaggataatttaattggaggctttaatcatacccttggaaagattctgccgatcagaaagggagttggtttagtcagaattagacaaggaaacatccaaaaggcaaatcctgacaattcccagtcaagcattggctgaggaaagatgtcctggttcagcaatttgctttgtcatgtcaggtggcagaatatccctgtggaggagacaggtgcctccagctttcagagcttgaagtcactgaagatccaggttcttgaaccagggccagtgtcctggccctgatttctttctcaccaagctctctgagtgcataatttgacttcttatgtggctgacttagagaagatacgaggccccacattctggtaatatagatctgtctctatgagctgggttaatgtgtgtctacccctagacacagatctgtctcagggtgctgacagatgaggctcctgacccacaaagcggaggacccagaccctggctgaggtgactgtcagtgtacagccaccttgaaggggatgtggctggatgaccagctgcctcgatcagggactcccactcggtagcataactttccatctgcaatgtggtgatagtttaatttgacagtttatttggttagaggttcttttttttttttttttgagatgaagtctcgttctgtcactcagcctgtaatgcggtagctcgatctcagtgctcactgcaacctctgccttcctggttcaagtgattctcctggctcagctgcctgagtagctgggactgcaggcgcctgccaccatgcctggctaatttttgtatttttagtagagacggggtttcactatgttggccaggctggtcttgaactcctgacctcaggtgatctgcacacctcagtttcccaaagtgttgggattacagacgtgagccactgcacccagcaattaagagattcttgaatgtaattggtattttgtgtgtgcatatgagggtttatcagtcttagcgtaatagtttagggtagacatactagaaggggccaggaggtggcagtaaaagatagctagtcatttaagcaattcaaattagaccaaattagcctaatattcagcctctccagggcaatttacgaagtattgagattggaggaggcaggatgggtgttgcttctagaccagagagagagagtctaccaaagtagccattctcatcccagctttcatgatttccctgaatcttactttaaactgtttttcattaaattttcctgtgaaattaaaaaaattctcaacttactctagttttcagattttatgtagaacatgtttttatatataggctgtaggttggattgtcagtggatttcagcagtgagggtctcccagccccttaatttctagataaggtggacctgactctctattccctagatggagcggggctcagtgctgtcctgagacatttattcctgaaccgcttctgtccctcacctcatgcatacatggaattggttctgtttggggatcatatcactgtccccactgaacatcaccctggctctcatgtggcatttggctatttttcttaatttgtacacacacaccatgcatgacacacacaaccaccaacaaaaatcatttagatgcagcgtgtgttagaggactttaataaaggtttaggagacaattccacaagcagcttaaaattggtggtcggacctcccgggtccctctgccatgtctgacactcagactctggcctctggccatgctgttctgtcttctctatctagctcctttttctgccttttccccccttaggaacaaagctcatcctctactttttttttttttctaaacagaccaatctttcaaaaacacaaaataaatcatataattttcttatttgatttcccaggtcttcctctataaagtcgtgcttcgtggctgacgagtgtgaccctttctgatcatgcctttcccgtcgctgaagttgcatcaccattcccgtctacactttttcctccccagctgcgctgggatggttcatttcttcatgctttgtctatgccattgcttcaggttttctttacctagttaattcctccaaaacatctcacttctgagctgcttcccctgagtcctcaggtttagagggagcctccctctgctccttcatggctgtaatgaattacttttcattgggagagagaagctgagtgttccagtcctaaactgtcactaattttgtgacacagggcatattaagggaggctagacgggctagatgattgtgagttatgtaagtgctgaccttcctcaaatgtaactgtgatcattgaaaaagtgatggtcatttaattcacatcagttcatcaaagtttcattaggtctccataaagaaatttctactcgctaattcgctctctaaatgttgggtgccaggtgctgtgtcgggccacagggacagagaggaagtggagatttccagagggaggatgcatccacagttctggaattcgggggaaatatcaaagttagcgatacgtatttgggattcaacagtgagaatatgggcttggcgtggtggctcacccctgttatcctgcactttgggaggccgaggtggttggatcacaaggtcaggagttcaaagccagcctggccaacatggtgaaccccatctctactaaaactacaaaaattagcggggcatgatggtggacgcctgtaattccagctacttgggaggctgagggaggagaattgcttcaacctgggaggcagaggttgcagtgagccaagattgcgccactgcactccagcctgggcgacagagcaagactgcgtctcaggtgggggggggtgggaaacagtgaggatatggccattaaagctattgggaagggtgccaactggggaaaatgtatggaagatctgcatagatcactggagccttggatacatcctgcttttcaaacatttcttctgtgaaagggaagatgttctgagtgcaactttcctattctgaaggattaaaaaattattttgtatcttattttttaaaaaattttttttgagatggagtcttgctctgttgcccaggctgtagtgcagtggcatgagctaccgcacctggccatatcttttataattggtacattgtaaatctttttttttttttttacataccccaaggactgtgacaatagcagagggcacattttataatgaatctacatattaaataaatatatagataaaatgtacaaacagctttcccctggaatgctagcaaatttgaaaattagctgaggatttatcttttgagggagctttgataactggcagtaacgttttttctcttctacttcctacactatgggatagggtggtgttaagttttgttaaaagtgcgggcagatcatgaggtcaggagatcgagaccatcctggctaacacggtgaaaccccgtctctactaaaaatacaaaaacaaaaattagccgggtgtggtggtgggcacctgtagtcccagctacttgggaggctgaggcaggagaatggtgtgaacccgggaggtggagcttgcagtgagccgagatcatgccactgcgctccagcctgggcaacagagcgagactccatctccaaaaaaaaaaaaaaaaaaaaagttgtttgtagcactatttgtggaagtatttttagcagaactctgcagagaagcttggagcttggtttctctggtagggagtattagattgggtctgggtcgccgctgatctttgctctcagactagcagagcattgtttcttcacaactaagttgtgcttatcaaaatgatagcagtctttagctaataaaatgaaaggtcacttctgtggcataagatttctctttgaaattccctgcatgttctctttttggataactcagtgatgaatgtcagaatgaatttggaacattacctttgaaattctgccacagaacaaactgaacgagaaaggtgactttttttcttttctatacctgaaaatcagaaaatattaatgaaattagtatttggaaaattaaaacaacagaaaggtaatttctatttttccaagaaaactgctatttacactttgaaatatctttttatatttatatttatttatttagagacagggtttcaccctgttacctaggctgaggtgcagtggtacgatcatagctaactacacccttgaactcttgggatcaggtgatcctcccacctcagcctctcaagtagctatgactgtgggcatgcattaccatgcctgactaatttttaaattttttatagagacatggttttgctatgttgcccaggctggtctccaactcttggtctccagtgatcttcctggctcagcctcccaaaacatgatatatcttttaaaaaatgggaaaagaaagtagggtatggaagttgtaacctagatctctaaaacttgactgggcataattttctagtgcttgttttatatagagatttcagatctctggctcagatactaaacagaatctttcaaggagaggctaggattctctgtgattattatcccagaaggtgtttaggaccagatgaatttcagaagtgctgttgtaattgctaaagatcaccatggggcatcttgttatagaaagatattcttcttcatagactgccaattcccagcgatctaaggactgataagctaattcattattctgatccttggcattctcccccttctccctcccataattcgcctctccatttttctatttttcatgctttctatgcacaaaggctgagcaaggaggtgggattgtgctgagataagcccattttgctcattgccccctgcacatgcattcaattggtagtgaggaggaagttgaatatttagggttcaggtgggggctctcagtgcctccccttttagaatattgcattctggaaaattaaaagcataaatgtagaattaaccctaatgtattcatctcccaggttcaacaattatcaactcctggccagttttctttcatctgtactctctcccgtattgttttgaagcaaatcccagatatcttattatctatgaatatttcggtagtatctctaaaagataagaactgttatattcttttgaacttcagaatcttctaagaaaacagaacatggcagagtggagctataccctaactaggcagagcctaggattaagaggagcaaagacagtgacttgaggtttttctttaaaagagctcagaaaggtaatatttcttcaatttattattgaatggtgcttctctatggtaaatccatggtaaatccaggtatatgagtttatgggagaaaagagagctttagcaagggatttgagagtgagcgaggagatagaaaagtgaaaataattgaaagttggttgttcttacatggcaaagtttataataaagctttgtggaatgtacattagagtcctttttgaaagacttaattgttcactgattggagattaaaaacctgtctaagtgtaagtaatcagagttttttagctcagtgtttaagtaccaactgttgttgaaataacgcctgtgcacctatctaaatggtaatgaaatgccagcaaagttatccatttgctttttctcattctacaacataacagtgagaggaaagggataagacatttgacgtctgatccttgttttgaaagctggggagacaaacatatatcagttagcataagattcctttctttttcccctcttttgaggcattaaacattctaaggttcgttaagatacagtagaaaaaatttttataaattttcttcttggattagaatcctaaggttatttaaaattaatgcagtgtaaacctaaagctactctgggatttactactctggaacttgactgttcaattacagatattctatgtagtgtgaagataatttcatggtgcatgcttgcagaatggaagagatgcctgcttgatgtgctgttataaatatatactgaaatgtagcaagttgcagcacagttatttaaaataccccctattccgtgccttccctttccccctttctctccttcccccatagtcccctcagaataccatgatctttgttcattcttaactaactcattattgtgctgaggtaacttggtgtacggacaacttcttagatgcagaaaatacttgtatgtttcttttaaaccaggttgacatatggaaatctgaatttgttggatactttgaggggggtaattatttgctttctaaagggattctttacttttttgaaggatttgcaatagaatcctttaattagtagttaatttccaattcagtctacacatagattttacagagcacttcttttaggcaaagtgagtgatggactgtattagtttgttttcacacagctgataaagacatacccgaaactggcaataaaaagaggtttaattggacttacagtttcacatggctggggaggcctcagaatcacagagggaggtgaaaggtacttcttacatggcggtgacaagagagaaatgaggaagaagcaaaagcagaaacccctgttaaacccatcagatcttgtgagacttactatcacgagaatagcgtgggaaagactggcccccgtgattcatttacctcccgctgggttcctcctgcaacacatgggaattctgggagatataatttaagttgagatttgggtggggacacagccaaaccatatcatggactctgcctgaaaatgtgctttttagaattttcagacattttgccctgtgtaaagctcccttcggccgggcacggtgactcacgcctgtaatcccagcacttcgggaggccgaggtgggcagatcacaaggtcaggagattgagaccatcctggtgaacatggtgaaaccctgtctctaataaaaatacaaaaaaattagccgggcgtggtggcgggtgcctgtagtcccagctacttgagaatctgaggcaggagaatggcatgaacctgggaggtggagcttgcagtaagccgagatcgtgccactgcactccagtctgggtgacagaatgagactttgtctcaaaaaaaagctcccttcttgtcccacattatttcattaagtcttgcctggctatgtgtgtggagtattactttgcttctgctgtgtgggatcttcttccctgcatttcttgaatcaagtacaagatgtcagcaggtgatatcctgaggaacaagatgggcaaataggatttaatattctacctaggtaaattgtgtcctccagcaacacatctttcctttaaagagggacattttggtggtttgagcccgttaagaagcaattttccaaaaccaaatttttccatgtctaacatgttcaaagaatagtcactctgggaagtcaactctctcttgggtttccaagttaataaccactcattgtgaccttgaaaggatcagtttggtgttaaagaaaaagaagaaacagttacctgggagagtgttagttcatggttgcccagtgtagagccctttctacagatcactggctcctctcatttaaggacaaagcaggggaggctgatgggaggccaggaggcaattttcatgcagctgttgaagctctttctggggctgactcttgaccttgaccgagaccacctctgggagcagctgaaaggcttcccgagattgatggtccttggcacactaagtgcctgtcttcttgtccctgtctttcacgttacctgccctttatagcagaaaaaggtatctctcattgtgcctgtgcttctttgacctggtattagttagcttgaaacaactcaaagagcaaatctgttcatctggagttgctcaccacaacacaccgcaccctcatttgatttcaaatacctttgcatacgttgtgctctttgaggctggattttctgaggacctttagagctcgttccctttgtttttttggtttgtttctttgtttcctgcttgaaataacctctgtcagctccctttaacaactccctggtcagcttcacacaggctctgttccacgtctggcctcagttttgtgtgaatctagtaaacgtggtgacttggagacagctgacccgattcaagttccgaccctgccacttgttactgtgtgatcttaggcaaattttgtaacctttctgtgcccaggttcctatctgtaaaatggggagtaatagtagttctcaccacagagagaatggagcaaacactggtttctccatccttagtttaagaaataaaatattacaacatagttgaaacctgattgggttccctcctgattgtgtttcccaccctgcccctaaatggcagccactatcctgaatttggtatttttattattctgtatctgtttatgcttttactgtttgtgtgattattgttttacatggatattggtaaataataaggcccatgagagacgagatggaactgtctgagaagccacgcctgaagggtgtgtagatcccactttagcaactgtaggtagaggagagtgcaaagctctgccatagctctcatcaggagagcaccaggttttggctttgtccccttctgtttggctgctgtccctccaggcctgttgatggacccaaggagcacagcctggcctctttgtattgttttgtgccttcacgcagaaaggaattatgcagccagaagtttatagccccaaatcactctctaatccactcaagtctgttcttgcttcattttaccaacatctgctttgttcgtttctagttttagggatgtgattaatgttcctccagcttctgactcgttgccttttttcccctttctgtctcccctctctccctggtttggtcttacttactctgaatactcagtctttgcatttcctggaagcagccctaaagcctcttctgtgaactgctcaccagccagatgcagcgggttcctgggaccaccccctttttgagcaccagagggtcaactaccggatgtgcatggccttgccatcaacatgcacaaccaattgtttagagcatattattgctgtactatgagtaggggattttgtgatatagaccgtgcacaggcaggtagattacatgtgtctgtccctcttggtcagagattcagcttaggatctcctagtggatgagtctgagctactggtttctgaccatttgtccttcagcaggccaatgacactgttgagctcagaagtggggacactagcttctccctggtggggctgcttctagctctagaggtttaggttgaattgaaatgacaccagttgctgtagtcattcatttccagaattcaatgctagagatgactgaattccttttgcttctttagcccctctggccggtcaagcttcacgtgaggtgtccctggtacctctcccccacacgctgctcttccttctgggctgtagcacttgctgctctggagtatgtggcagctgttcctcagttctgcccatgacctcactcccttcccctaccagtcacatttactgactttggttttctgggtgctgatccatctcctcctgaccaagcacgttacagaactcctgtggggcaatagctaccttttgttcagtgtgtctgcagagccatcatgatgactctgagcactggtgggttgaccacctcaggacattagtttctcttcctccttcacccccggcggggagagaaaatctccaagtctctgttgtagcacttccaccttatgttgaggttcctggtctgtattattcttgattcgtctttatatttccagtacttaccccacatcttatatatgagaggttcttataaataacctcatatgagaaaaaacttattaaaaaaaagtctaagcttcttgaagctacaaagctttaatcacaaaaaaaagttaagcaaaatctagagtaggtttgatgtggacaaagtaaaagttattagagggacttggaacagaaaatgtccagacgagaggtcaggccacggactgacacaggggcataagctggtacacgcagatagagcatgcttcctgaagctgagggaattgggagccagtgcctgacacacacgatgagattcggaaggcaggggtcaaacatgcaaagatggcagctctgcagccagcccacagagctaaggggcacctctctccaatcctggcaaacgctggcacaagacacaactggattctttctgttgctcatgaattttcatgaggcagttggtgagttgttctccaggtctgtgggggaattaacaattcaaaaggtgatctcatactactcagacccttgtgtttacccccgggaagatcttctgatcattaacaaggttcactggacatgctactctgtgttgtgtgcctgttgcttggaggtcctgatgttcagccatgtggggatgggctttgggcatcctgtaatctggtagacaatatcagcaagtacaaaaagacctgtaaggtaatgagtagtagaaatgttagttgcacttcctcatgtgtgatacagataatagaatactagaattgaaatcatataagtaaaacattttttaaaaatctaaaaatttatatgtagagaaggtacttttggaagcatggcctttggagaagatgccattgattttggagccaagagacctgggttaaagtcccaagtgtggattgactctgaggcttgtgaaggtcacttaatcctaatcaatctttgctttctaatatgatatatgggggcaatacttgtgggatagggtagtaaaaattaacagtgggataatatacatgaaagtgccttcattctttcattccattcatttgttcagcaaatactcattgcttgttttgtgttatgtgccaggcactggttggtgctaaggagatgaaattaaagaagaaagctgtgatcattgcccttccgatcttatagataactagactatacagaaagctgaaccacattatgtacttggaaagtaccatgtgactattttagctggggcagttagaaaaactttaagaaatatggcacttagatgggtaatggcactttaagggtaactctacccttaagggtagagttttgacagacaaaatggaggaaggggacctctaggcagagaaattgagtgtgagcaaagagaaagtgaagggaataattggataaaatgagtggttcaatgaggacaggaatgtcagggcaggaaaaatagattgggcttggccttggcttctccttcccattccctccacctttcagcgtgagatttttagccgctcatttgtggaatagagctgagaggagggtgatcagccacatgggatccaatcactagcttcttcatttttagttaaaattatgacaaggcaagattaaacacaaagaagggctgggtaggtatgtatgtcaatctgggaaggactaaattctaggggagctagttgggatcttttctctagccctcctagaagtcttgtagaatttgacattcatctccttttgtcttgaaaatctgtgccatttatagttttcagggggagaagctaaattctgtttttgatgagctgagtttaagatggcccgtttggaagtggcccgttgttaggcagaattaactacacatttagtaacttcaaggcagtacctaacctagtgctaggacttctttctctcctttttaccaatgttcttgatactgggaatacaaggtcccaaacctacagaagactcgttgatttggtggcaggtctgaacttcagtagagacttaaaaatcctcagagctgactgtatacacttcccggaagtactgtgatacagttcgtcttcctactgcggtataaggtgaattattcattcagttacttcttaaggaaatgcttatcaaacatcaaccatatggcagatattaagtgctgggaatgcaagaggtataagacaccactcctgatcttaaggaacctacggtcttaagctgtacacacatgtgtacaactgtggtctgataggataaggacagacagatcataagaaggaagtatgatgagagaggacagatcataagggagtatgatgagagcccaagaggaagcagggtggctgcatagctgacctcttcacccccttcaagtttttgctcaaatgttctcatttggatgaagaccaccccaactctccttttaaaaagggcagcatctgccacctcaacagttctgagctccctcaccctgttctacagttttgctttttccattgcatttattgtcctctgtcccagttggctgtcgctgaataacaaaccatctacaaacttactagcttaaaacaatgattgcctctgtctccctgttctgttggttgactgtacttggctgggtagttcttgcttgggatctctcctatagttgcagtcagacatcagccagggttgccatctttcaaaggtgtaactgggcgggatgtccaagaggttttctcacatggctggctattgaggctgctgtcagctgggagctcagctgatgctgttcaccagaacatcttcatgtggccactccgtgtggcttgggcttctttatatgacaactgggttctaagagatagtgttcaaagattgagcattccaaggggtaggaagtggaaggtgccaggccaatggcagaccacctttggaattaggacagcatcacttcttctatatctattggtcctaggacctgcccagatttactcttgctgggggagtggcaaggtcacattgcagaagaccatatgggatgaaagatacagttgcagccattgttgggaagtcattctgtcatacttcctaagttaatataaagtttatttttatgcctattttttgttgactcttgctagggtataagccccatgaaagcaggtgtacccactgatgcattccaagcacctagaaccatgcttggcacgtatgtacacaatgaatgtttgttaaatgttcaatgaatggtgtctgttcctctgcgtttaggttgttgcctgtcctcggggtgtgggtattaatctcattcctaatttacattcttttctcttttaacagaccgtaacactctataagggctgttagcatgcctttttattcaccaccatattgctcagtgcctggcaaggagctgatgttcaataactgtatgttaagtgaatgagatgagaccatatttgagctgggatctgaaggatacatagtattttgccaagaaaagaaggaggggtagagcacaaaggcagaagaaaatactgtgtggtaaaagagaaggataaatgagactgcagtgaaactatgagtcccctgaagctaggtcccacccgatttgacctctagtctatttctcataggacataactggtgattccatttgccgtaccctctgcacatgcttgttgaatgaatgaatgtcaaaagagtgtgtaatacatgaactcatatatggctttttttgtggggaagcagttgggttagataaaatcaataataactcttgctaattgagaaaatcttatacatacaaacccagaaatatttgttaaagtattgaaaaatagtaaaatgtaatatttttgagcataacaaaagctagttcaatttgtcacataacttgcaatcagagtagagtcatttatagtcttatgttgccttcctgcccattgtatgcccaagagaatgcggcaaaatatttagggtcaaccctgaaacttagaccaaatcttaaaagggaaagagactaatttttaggtcaaggggaaagaagaatgagccatgcatttttcttttttcttttttgagacagagtctcaccctgtcaccaggctggagtgcagtggcatgatcttggctcgctgcaatctctgcctcccaggttcaagcgattcccctgcctcagcctcctgagtagctgggactagaagcgtgcaccaccatgcccgacaaattttttgtgtttacttagtagagttggggcttcaccatgttggccaggatggtctcgatctcctggccttttgtgatctgcctgcctcagcctcccaaagtgctgggactacaggcgtgagccaccgtgcctggctgagccatgcatttttcaaagggataatgaaaatcaacagcaagacagcagagtagtgaaatccatggtacaaacacaatttttaaagaaaattaacacaaattactatttgtaatttaatctttaaatttaataatgctttaaaaatcttgtgtcttttctataagcttgtaaaccagatattaaaatttcaaggaaaaaaaatctatttaagcctttcatatcttaagccgtaagaaatattcagtgacaggaaaatagagcacttgtatgacttcttgtgctttccattcacatagtggtttaaaaaaaccccaaaatcaagcccaattaccttatctttaattatatttagcagtagagtttattaatcgtctatgcaaaatcaatcttttcctttgcccagttctgtatgaaagtactaacaaatagtgaatattttgtgcaaataatgactcataaaaatgtagactcagccatagattttaatttatatgccttgaatctgacaactgtacaaaaataatgtgaaaaataaagcaatacttgagacatgaagcaacccatttttcctgatttggcatcctgttagcagggagaagtctgtggtgcttcatataggcaagagcttggcacggccttaaccatgcatagtcttccataggtccattgataccttcagttcttcaggtggatcattttcagctctggaagcattgtgcgctttaatcagtcattcttacttttatgtcctgccatctctagttgtggaatttttctggctagagcctagtggttcattttgcatgagttgcgagcctccctcattgccatctcagccagtgaaactgatttatcacccagagtgatcacatgcccttcaagtattttatgatagtattcacatgtatatatattcacacacacacacaaatcagattttttcctgactctttatcaggcacgtccaagaatgctgaaagtttattcctagcccttccagcaggtatgactgtagtctgatttccaaaagtctgaagaacctgtttgatcacttctgaatgggaacaagacgcagcggttcctgggggtttctccttgtaggatgtatggctttcacatttgaaccaccatctgccatcacccaaactgtatattcagaaagtggcttatgtttttcctctggcaccagggttaccatttatagccacacactcgataatggtgacattctttcaaagatcctagtgtagcatcaaggaggtcagacagtggtattttctgctagtacctctctgaagcttggttatttccttcagaatatcccagaagataacctggtctgccacatcgacatgtcctgcagtaattttctgcacagtggggcgggcaatcttgaggtgagagagcatgtggccatttatcgtctcccctggaggttccttctaggcttggcctgtggccttcttgtgggcactgctgtggcagacccactgcctccttaccccactagacctcaggccttcatgtgagttttccttttttttttttttttaaagagctttattggaagatagctcacataccataaaatccacccatttaaagtgtacagttcagtgacttttagtatatctacagatatgattcacctatcaccaccaccagttttagaatattttcattgccttcaaaagaaaccccaccttttattcattgctgccctctctccccaagaaaccactagtctactttgtctctatagatttccctattctgggctttcatatgaatggaataatacaatatgtggtattttgtgactggcttgtttcacttagcttcatgttttcagggttcatccacatttggcatttatcagtatttcattcctttttatggtctattgtatggacagaccacattgtgtctatccatgcatttgttgacagatgtttaggtggtctcctcttttggctattgtgaataatgctgctgtgtacatcggggtacaagtttttgtgtgaacatatgttttgtgtgaacatttcatttctcttggttatataacaaggagtggaattgctggatcatatgtaactctgcttaatcatttggggaaccaccagactgttttccaaagcagctgcctcgctctacactctcagcagctgtgcctggtggttccagtttctccagatcttcatcaacacttgctgatctgacttttcgattctagttatcctaatgggtgcagactcatgtagattttcttttttaactgttaaattttgtgggtgcatagtagatgtgtatatgtatgaggtgtgtgagatacagcaaacaggcatatgatgcataataattgatacaggcattcagtgtgtaataatcacatcagggtaaatagggtatctgatacctcaagcatttatcttttgtgttacaaataacccaattgtattcttctagttattttaaaatgtgtatttaattattgactaaagttaccctgttattcggtcaaatactagaacttattctttttttttttgtacccattatcatgtaggttttaaaagattttgggaaggattttcccctttgtaatagttttttaatgcaatgtacacattttgggcattctctttcctagcatctgtaaaagcatgactcctaagaggtcctcttgcctgtcacaataatgaaatttcattgtttgttaaccaaaaaatttcattgaataaaaccagtgtggaatacttttgtgaaatgtgcgagttgaagggaggaaggggtgtggggagaagcggggcagttggcatagctcctggggtgttggtctcctccaggaaactgctgtgattctcttccatgtgtctgactggtctgtttgcctttcaggaggactggcgttagcccaggtgctctttttctacgtgaagtacttggtgctctttggcgtgcctgctctgctcatgcgcctggatggactcactccacccgccctcccccgctgcgtgagcaccatgttcagtttcaccgggatgtggaggtcaggcgctgggattgctaaagttggtcaggcatgtccagtgggaggagcatggctgggccggcctcaaagggttcgggctactatcctctccctgtctctcactcaagctgcatttggcatccatttcttcatcctactaacaggatgactaatccatgctttctgggtctctcacaattatgattagtctgtgtagataggtgagataagaaagtttctttctgagtctgtgtaccgatgcacaaagggttatgtttgaagtggtttcttactaacctgggaaaggctactgtatcttgatttatttaattgctttctctttttcttgaaaatgacatcagtgtatgtgagactgttaagaaaaatagactcaggataggaggttaggccagtgttgcagtatactatttactaaatctaagtttcatttttcttatctcttaaacagtagtaaagataatccctgtctccaggagttgttttgaagattaaataacctaatgcatgtagagcaggtggtatataatagatgtttacaaatgttagctttaacacttgtgttattcctatgctctgtggacatgatagatacttttttctgaaattttctttcttttctagattttgacccatagtcttatggttggtgtggagtctcttttccttagtccccctgccatttcagattgttgttttctacgtgatggacttgttgctgtgttcctcttatcgcttccagagtgtaacaagtgacaggattgagtttgcaattgaaaacctaatggaagaacctcagggtcagcactggcacaaccataggagtcggtgccttattcatgtggctcattcctttttattttttaatttttgagacaagttctcactatgtttcccaggctagtctcaaactctgggctagatccttccgcctcagccccccagtagttgggatcacaggcttattcattcttaaatttcatctctataggcaaaaaaaccaagacacaggtaggggaagagctcaataaatactgccatatctaatgttgccattcaaaaggaggtagttagcactcaacatcctgatttttcatagtaacttattacagatgctgaatttatcaaagcctctctaaatacattttatttttggtctagtttgcttcttggagtaagaaatttcatatggttattgcaaggaattgcaaggaatgaattgcaaggaattgcaaggaatgaattgcaaggaattgcaaggaatgaattgcaaggaattgcaaggaatgaattgcaaggaattgcaaggaatgaattgcaaggaattgcaaggaatgaattgcaaggaattgcaaggaatgaattgcaaggaattgcaaggaatgaattgcaaggaattgcaaggaatcgcaaggaatcgcaaggaatgaattgcaaggaatcgcaaggaattgcaaggaattgcaattgcaaggaattgcaaggaattcaaggaaggaattgcaaggtttctttttgaaagaaacccttcaaaaggtggggtttcttttgaaggtaatgacattgcaaggaatgttgagtagttactctgatttgtccttacttcatcaaatatcacacgttgccctgttttcatggcaagattgcggaatgttggcaaagaggtgctctctaactagaaggccagggagtggtttttgttgaaaaggtgaccctggttggaaggttctgttaacttttgatttactcatcaaagtcacttactgagtcaatgggttgggacccagcatgatttgggaacatgtcacaagtgtctggtgtgaaccttgcacagtccctctgcctactcagtgtgaatgcttgtactcttgcatttcttgggaagcacatacccctaaaaggcttctcccatattggctggcatgataaaaccataactccctggcacacatgctggtttctgggtccatgtccataaataccaacccactgtgtcaccagaggcagtttcggcagttgactatatttcatattcaaaatgattgtcttgtcctttattttaataatttttttttttgtccaaggaagaccttcagttctatatcaaccacagaggtggagagaacatgtctgtcaagacctttgtcactgtcttgattagaactagactcatatagttgagaccccaggctgctgaaacagtctctcctctccctcatttaagacaaatgtggacaaaagagtagtaatgaaaagttaatctgaggaggaagctctggggtgaccccttggaatgatgtcgttctaaaaagaggtgtttctgagggcatgtgacaaagtaacaaagagggcctttcctgggagtgacctagacttttatcctagcttctttagcatgcataggtgtaggttttccactccacatttttaggtttcttgaaggattttccaggctactaattatacttagaaacacacaggtctttgtacagaatggccattccatactaagtagttaaatttaggtatggagatgaactttttctgaggcagtgtacaatgtaagactcagaagtagttttttaattgaaaaaaaagaataacaattagagtgtctcttttgtgtgatttgcagatgctcctttactagtaggaggaggttgaccatgtttcatgttcagtatctggtggcataaccctgacactggtcctggtctcattctctaacttttctctttaagaatgcttgttaaaggaaactaggttttgaatttgtaatttctattaacagctaaccttactttttctgggccatctgttgaagtattgctgcagacagggaatggctctcttcctagatttaggtttgagacaaatttaatcatgagcagatgtgaatgctggtgatgcaaattattctgctgggtcatgtcagctattcacatggtgacataaagggcatggtggatgggaagtggagggaagaaatgtgaaaacaatctccagagatgacttaatgcttacctgaacttctcaaagatctacgctgaatgaggtttagaactgctgatagaggaatatttagccaccccccattttaatggagccataccctcctgaacaccatgttgactgattgcatcatctttcagcctacttagcattgagagacttgaagtcagcagcctgccgtatcagaggaatatgagctctacagagaacagataaaattggccattaccagagagaaaatcttccttgccatgctagttcaaattgactgtgaaaaattgcaattcaccaagaaggcccaaacctgaaagttagaacctgatgggtttgtttttctttcctcttaaatcttctttttcatataatttctgctcagattgtttacagatataacaagactccaaggagtacgtgtattcccgcttgcatgatttttctggggtcttatggacctgagaaattgataattttctgcttaatttttggatttcacgttttaatttagatgggctgagatctgtaatgagcattttttgccaggagtcattaaagatgacgttgtatgtctaagactccaaattagagacctgatcctattttcgtgatttgatttctagctatggaagcaaagcgatagaatttcccatggtggctggtgagttgtgggtcagtttcaattatttcaggaatcctgcacagcttgccctctgcatttcttgaattatgatgctttcaggtgttcagaggcaaactcatgcatgattgcttatcccagggggatctgggtgctgttggtggctgctagaccttaatatataggagtatctttaggctgagaatgaggaggaatctgagcaccttcttttagtgaggcattgattgcatgggcttttaggtcaatagaataatttaggtccctaggtagagagttggttcagcatgttagatgataaatcagttctacaaactgctggctttgcattagtactgcctttgaatcatgcttaaccaccagttgcaggacaggatggtggtcctggagttggtgaagtatattatcatgtctactgggattgttgggtagaaggctggaatagggtgagcataaagaagaaaaggtcaaataggtgctgttaataaaatactgctttttttttggcagcagtctagtgactaagcgctggctacctactagttatgtgactttggacaaataatttaaattctctgggccaatcttttaatctctgaggagaatactactactttgcctcataggggtgctatgaggattgagcgagcctggcgtatagtaggtcctcaggaagtggtagtttcttagtactttttctttgcttgaaaatcaaacaaagccagaggtgactgagaggtcctcctgctaatgggccgggtagggaggaagtgagcagtgatgggactggctgatgaaaggctcaatttcagctctgcaccggagatgtgatgattctgagatagagactatggtggaagcagtatgggctggaccttcagaggagtggccttggtcttgtcatttttgtctgtttccttatgtgagaggaggactgaggtgttagatgaaaactaggaacaccatcttgtcactagatgatgcctgtgttcccctctacttgtctgttagccccagccacattgaagggagatgaccaccaggatccctgtgctaaagtacatccaccccgacaaatctccttattcctcagtttcttgaggcattaaaatggggctgatcatagtactcatctcactggattgttgtaagggttaggtaagatcatgtactaaagcactggatacacggcaggcatgctgcagagataccaaaatataaatgattaactgatcattacataattatataaataatgattaataatcattacaaatagagtaaaatttatgccatttgttcgtttgtggttttatttatgagacagtgtctcgctctgtcacccaggctggaatgcagttttgtgattatagctcatagtggcctctacctcctgggctcaggtgatcctcctgcctcagcttcccaagtagctgtgaccagaggcacacaccaccatacacagccaatttttttttttaaagttctgggatacatgtgctgaatgtgcaggtttgttatataggtatacatgtaccatggtggtttgctgcaactatcaacccgacttctaggttttaagttccgcatgcattaggtatttgtcctaatgcactccctccttttctccccacacctggctaatttttaaattttttgtagaggaagggtctctactgttttggccagactggtcttgaactcctggcctcaagcaatcctctcaccttggcctcccaaagtgctgggattacaggcatgagacactgtgcccagacccaccatttgtttgttttttaatttctcagaaaagaaagacccgatagggtgctaagtgttgaagtagatggaaggtagaagaggtgagtgacaaaaggtgaaagacggatttcaaattagacgcatgggagtcccctgaatctgccccagtatgacctctccctcactgctcacagagctcttattcattcatatagctttgcaagcagtttccagccactagacatttatattacctcacattttaggtacctaccttagtcaatccccctctctcatagtcccatctcaacaaactcaaaagatattttctttcttgtaacattcatattttaaaatcccctttccttttccttcaaacatagacttccatagatcaaagtggaaagggactatcaagttaaagcaaattttacgaaccatcattatgtttcgcttcctggatttatttttgcttcacagatagtgtgtcctcttctccattttctccctgtgtggaagattttttttgggtgcctttactattgacaagctcttggatgagttttagagtaagaagcaatctgatgtaagaagcaccagacattttcagatggaagatgttgatcaccagtcaccagaacatagtgtttgaggccacagatctagagcctgaactgcctgggtttgaatcctggctccactacttactagctgatgacctctctgtgccttcgtttccttctctgtaagatggagatactataaatggtatccaattcctaatggagctggaaccctgtacctttcatggtaatagtcacactctacttggttgcaacccatcagcatataagccctttgaaggcagtgatcatgtcttattcttgtttaatgctgtaaccgtagcaccctcctcagtgcccagcattcagtggaaagctatgctgaatggacaggtggtcactcttctgaaattttgatcaccaggtcttaagagcaagatttccaagtatttaggtctggcagctgagcggcttctctctgcagcatgtggtgacatgtggctgtaggtgtactgtaccatgactgcttgttgatactccactgtcatctccctgtttttctcattaagtattaatacgtgacatgccaacatatcacatctgccgcaatttatttgagaatggctttgccttgtaaggaatctagaaagaagagtgtttgcctttcttactttatgactgtcattattttatcagatgttgtgccacatcctagataagagatgagggagaaagttacaaatgtaaaggaagaaaaagggattcaattcagacttggctaggagagaggagtttggcaactgtttatctttgggggtaggatttttctgaggggggtgctgaaaggagatatcctaatgccttacagaggaagatgaggaactggatgcaaggctgggagagaagcccttctaaaacacatcctcagaatagcccaaactctagtaataataatcgtaataataacagcaatagcagcagcagcagcgcaaagaacacataatgcttacgttctgccaggacagttatttttaaacaatgttttaaattcatttaaaataacattaagcccattagatgttaatataacatttttttctgaaaaagtaactgttttccaatatcaaataatttagtgagaagttttttgcagatttaaacaaaattctcctagcaattttcaatgcattgttgtttactttagtcaccgtattatatgacagatctcttgaatttactccttctaactgaaattttgtatcctatgaagtagttactgtaattacagataatccggggaaatggacaaatattaagaacaagtctaattcatctaaaatattcaccacctttggaaagtaaaattatctgatcctgtaataagatcagataacatctcaaaatcaattagaaggtacttgagctattacagctttgaaaatgtctgtccctgtgtttgtgcacgcacacacactcaagtataatttattcagaaaaaaaatcctcccacacggcttgttcccacttctgcaaggacagttctaatttcttttatatattcaatgtatttaatctttacaaaacccctgtgaagtagatactattatttttgccactctacaggtgatgaaactgaggcatagagaagtggagtaactctcctcagatcacacagcaagtgagtggtggagctgcgatttgaatccaagcacatggctcttgagtctgtgctcttgatcactcccttttactgtctctctagtgaaatggaactgaagcagatttctccttcgtgatctggagtatggggcttgtgggacaggatctggaatttcggggtacctgagaatgactatggcttacatactgacccctagaaagggaaatggttcagggagtgatgggagtggttcagtctgtgtcacagttgatgaaaataaactctgtaaaatatttaaagaggtttattctgagccaaatatgaatgaccaacacccaagacacagtctcaagaggtcctgagaacctgtgttcattaggttatagcttggttttatacctcaaggagatataacacgtcaatgaatgcacatgagttatacattggtttggtctggaaaggcaggacaacttgaagtgggggcttacaggtcataggtgggtttcaagattttctgattaactattgggaaaagagttattatctaaagacctagaatcgatagaaaggaatgtctgggttaagagaaggggttgtagagaccaaggctcttattatgtagatgaagtggctgctcttagaggcaatagatggcaaatatttcctcttcagacctttaaaaggtgctcaactctcagccaatctcttcaagatcagaaaaggacctggaaagggaaggggattctctacagaatgtaaatttcccctgcaagagacagctttgcagggtcatttcaaaatatgtcaaagagatatattttagggtaaaatactttaatttctttcagggcctgctatctgtcatgtaatgctatactagagtcaggttggaatttggtatcttattgccacaaagcgtctgttttgtcttaagatctctgttttaaggttaatgctggtcacttgtgcctgaattttgaagggaagagagtataatgaggcatgttcaaccccttcttcccatgatggcctgaactagtttttcaggtctacttttgaatccccttagccaagaggaggggtcgattcagttgattggggggctcagagttttgttttcagtttacagcaccgagggggacgggatggggagaaagggagtcaccagtttaacctgagtcactgactgggtgaatggtgtggggccactgggggcttctgttcttaccttacatccttgtgttacaaagagcaatccagaaacagctgccctgatggaggaaggaagtggaggctttacctgctgcccacaaagacttaatttgacttaatttctcctgccattgtctcctcctgcatctcctttcccacagccaccttgatgactgtcctcttcttctcttcctttatctcagttcatgctgggtcaggtcctccttgctaatgaaaaaagagaattgtctgtcctacatctgctggtcttcaagcttctgggtctgctagctctaccttatttctaattcagacatcccttcagcaaagtcgtgttgctttttgccccacctcagttctgaggactgagtgcaaccttctgtttctctgaaatatttacagaatatttggatatgtcaatttcacatttatatgcaattaagtctcattcttttcctgtataatttctgcctttagtcatcagctgagacttcatcttctacactccatctaaaatttatttttacgtagggcagaaattcctaatttggggatccacaagccactgaatcagtttttctttagcttttagaaagaccaccccccatagaatccctgcctcctagcatgggggctggcacatagtaggcacttaacaaaccgatattttctaagtgaaagaatgcatgatccttcactattcccactcctttgaggaagagataaataataattatttattttctgagacaggctctcgctctgttgccgaggctagattgcagtggcgccatcacggctcactgcaaccgccaccttctgggctcaggtggtcttcctgcctcagccgcctgagtagctgggactatagatgtgcaccaccatgcttggcatattgaatttttgaaatataggtttaacttaattttttatttccagtggttaacctaccagcctaagtgcctttatggtgatcataaaatgctgtcttttgccatagtctgtatttcctatgttgacctgagacttcctgggcccatcctccagcggcatgcattccaggttctgtgtttctttaaaatgtaaatgttgccatttttgtgtgtattgaaagactcagcattagaatccaagaaggaggttgtgtttctttattgagtctagtggataagagtgagtctgacgaggagggaaatgtggtgaacttgcctggttggagtccacacttcttttcttcctaacttggcctcacctcaggtgtttttttttttttccgttttttttgtttgtttgtttgtttgtttttgagacagggtcttgctctgtcactaaggttggagtgcagtggctcaatcagggattactgcagcctcaacttcccaggctcaagtgatcatcctgcctcagtcccccaagtagttgggactacaggtgtgggccaccacaactagctattttttttgtttttttttaattttagtagagatgaggtctcgctatgctgcccacactggtctcgaactcctgagtgcaagcgatccacctgccttagcctcccaaagtgttgggattacaggtgtgagccactgtgccgagctcaccccagttcttattaactaggcagacccttttgagtcctggccaggccctggcaaggctgtgtactttgtgttaggcttaccttgccatccatcatgctgtaccttatcctggttttctggccttcatccctctacctttaatgcaggaacttctggatctcttcttgcacaggggttgctgaggaagacttagcagtgccagccaagcctcctccttcactctgcctaactacatttattgtgatatgatcaccctgtgtttttgtgggatgcatcttgcaagagtggtttatcagagtcctaaccaggaagtaaagccagagcctctctgattgggtttttacctccacctacatgacagacttccctttcaggatgccatggggtgacctgagggcaggggaagctagaacatgggactgaataatttcatcctcttctttctctttctttttcttcccatggttcactgtgtcacaagggattggttttttgtttcatcttcctattctctcttgatgacatattcttctttagggaaggaagccttgtggcccagcccttgtagggcgaatggcgtattctttttgtaatatggaggaaaataagttttgactcattagatttgattctgaatttgtgagcagccagacaaccactaggaatgagggattgctgagaacaaaattcattgttttagttaaaaaaaaatccctgttaggattaacttatttattcttgtgtaattatattgttaagtaaggatttagatattatcatcaatgagaatcagagacactgatatgtcccagatcacagagctggtatgtgctaactgcatttaaatcctaatcctcttaataaggttttgaaccataagtgtgtttgctcatagaggagcatgtgaaaatttgcgtattctgtagcactgtgggtgaataggttttttcttcctgttagaccaagaagaaaggcagaagttttcttatcctttttgtgagtcctgagattgcagacgattacagctacagacaacatttgttttgtgttgctatgcagacctactgtcatctttattctaatccacctgtctgtacagacattcaaagactttctcttggtatactaacaaattctctgatactgtccaactgcttacctaatgaataagatgaatactttgtcttctgctaagaaccacaaactgtaattacctgcagggtaaaagttaagacaaattctctggttgtcatgcttgcaaacaatgctttattctttagcatggtgtataagcctggctccaaccttctattagaaattcctctcactcaccttactggcaatagtgcagaacaagtcttcattcctcagtccagcctatgcagctctcttacaaacctccatgacttgggtgctggctttttagtaccatagggcacactctctggacccttctaatatcaggcaaaataccactgaacttccggaggccagggactgctataccttactgttttgtatttgatattttgctttaacacagccagtgttttggtatttagcaagagccttgcattagattcttggtgtcataagtaagatctgaggaacagccacatcagtttctcctgggagcttgttagaaattcaggatcttggctgccaactaaaacccatggaatcagaatctgcttttcagcaagatctcctatgaacagtgtatgcatattaacatttgagagtcactgggccagatgacttctcaggacttctcctccttgacatgccacggctccatagactgcctggatgatggccatgagtaactgtaaatatgtttgaatattcaatatcttacattcacatggatcacagggaccaggaccctgaagaacttaaatgggagtttttactgactttaccaggggatgggaccacaaaaggactgaagagacaggtgacaacaaacttgttgaccagctctaaggcagggagggtgctggagggcagctctttggaggaggtaaggaatcagggaagctcgacttacaggtgctcaaaccatataaaggcaactgatctacagccacaaaaacttgggaaaaatgagttgccccatttgttgtcacaggatgcatttggcctccaattagttttcctgtatatgacttctccccttctctgccttcttcccactgtttccctagagttgctttttgtgtgtaagaagcccacaggggagggactctgccattcaggaagaaatgcccagttcctggtttctggccgagtcctgtaggcatccttctgtggattttggaggattgcccacctgatgtccactgcagggagggatctagtttcctgtgagactatttacataggagagctgacctaccagacttctggaaagcatcatcaggggcatggccttactgttgaaatagagatgacaagttcaagtaggcattccatttctgggaaacttgctagctgcaggctacagaggatttgctaagaagttaattaaaatatacatcgtgggtatcctacaggtggcgcctgggttgtgattagtgagtgattgcgaggcagtcaggcaaggttgcttgctgcattattttaatcgaggttcttcagctgggagtggggaacagggttgtcattaggagactaagggaaatggacttgcagaggcttggtaatgggggcagtagctcagatcttatgacacattgtcatcataatgtaaatctgcaaataatacttgtctagttggtggctgacttaattggtagcagtaattgtcatagcaatatatttccaagattccttgtatttatgttgcagttgggattaggtccccttcttgcagtctggttttaatgaaaaaactgagagctaagatcttaggttccccaggatttctcaagtgagttcctactacagagtgggatgtggtatatttgagacagatgtatttcctcctgagttgtgtggtcactcactctaataggattgatccagagggaaattcaagggactggttttatatgttacgttttttgtgtgtttcattttctattagatagcagatttaattttccgaaagtttttagcgagatcatttgccaatatttgcctttggctcaatcatgatcaactaaaatgtggcctaggtgccttccttcctcaaggctgttggttgtgagagtcctatcagtagaaccaagaaactggaccagcccctttcctggtttgagtaaagacttcaattagagttataagtggaatttggctgtggtccttggctattgggatggtgaaataggaaggtgaggggccgaatctctggaatctaagaaaatctttagcagcctaagggttctaggtctcttgcctgtgcttcagaggagagggaaggatgttaggtgaggtggagagtgattctctcccactctgtgaaagcatcttcctagtggagccttgaccacaagggactcttcggcccttttccagcataatgtaggcagaaaggaattttccttatgacaagtagggacaggacctgccctcaagaaatctatgcaggctgttcttgtgtgagtttgtcatatatgcacctcaaaagtgccatttatccagtcttagatggatactctggaactgttggccccgaggaatgtgtcatgaaatgtttttctggtgctgggaagcatttttctggaccccttccctccataatgagagacaagcatctgggagagggtttgcagagtggtggcatctgtgtcatgccatctgacccgtgtgggcttaaagtgtgatctcttggctgttgtactctgaccactgagtggctggtggaggtgccagcagcaggagtagcaaacagtttgtcagctgttcccgggcaagttttatcagcatcacactgaacagagtgtcccctatcgtttgacctttccccagattattctgtaacttcatatttgattcttggatggtctagattattctcatcaatacttcgcttacagactatttagacttgttgtagagcctctcagaatgaattgtacctgaaagtccaaattctctttggtcaaggagtatttattgagcacctactatgggccaaccattgacaaatgtatatgatacagagctgaatagaggagtccctgccctcagggagttaatactgacaagtaatgtgtcacaagacaggcatgaccatcactgagtctccatagcccctgaatgtttaaaaacatttccacatctattgtctcatttgttggttcagtagattagtcggagaaggccttgtttttgtcatctccattttattgatgagaaaaataaaagcttaggttaaatgatttgcccagagaggagagtggcagacctgagacaacaccatgtcatctcccaatagcatgtcctagtttacttgatgttggtttctgtaacagtttaccagtgattagctttaaactgtcatgtctttaaaatgtaaatattgtggtcagtggataccttgaaaactaaatgaaattacactaattccctgaaaataagtgaaataaattgttttgtttgaataattgtacgtcactttgacataaagttgttggaaaagcagagcaatattttaattcatttaaaaagcatttaagggagttatgtaatgatgtagtctagagaatagagcatgagctttggagtccagcagactcggagtcacatcctgtccttactagttctgtcacctcggtcaaggtacttaacttatctaagccttagtttctctacctgttaatgggctaatgatgcctacctgctggggtgaaggtgagaatttaatctttctgtataaattaaggttcatgttctgtttgttactggacattcaggcattaaaggtgtgtgtgtgtatgtgtgtcttttgactaaactgacacaatatgaattacatagctattggaagttcatatggggtagaacaaggtgtagtcaccctccagggatactgacaccaacgtccaaagtgtgctggaggtgaatcaggattgagagagacctcacctccgtattgaaatcccacggacagactgcaagctgaggagtcaaagttgagccagcaattaacccatttatgcctgaggttgcaattttttgaatatttgcaatcagacctcggcgatgacattgagcagtaggatataagtaactcccacatgcttcgtgttccagtaatggaacactagccataaatagttgccagggaagacatggagctgcagctattgatatgtaatgaagctgctgcttacatgggcaactctatggagcttattccaggaggcacaacaccagggattttagttactaaggattaatgcaaatatgatggtgcttggcaccccccatttctgtttggagcccgttacatcctgcaccccttgctgtcttgcactttccatctacagtctgcctctagaaacctggcagctgtctacctgggttcagcttcagagcctgcaggtaaactttgttccccatccagcctctgcttccctttaggctcagctgacctctccctgatagctcccctccaggagagcattcccaccttattcctttattttcctggatacactcatgtgggacttttcctctaggaaggcacttgtcagatctctgcttcaggggaggctgtgactccatccatctatccattcactgatcgaacaaatatttgttgagtgcctgttatgtgtcagcaactgtgctttgtgctggggatatagtagtgaacaaaacaggcaaaagcacatacgctcacatagcttactctccagctggtaagacagataattaacaaacctaataaataagcgaatgatatggtgtgttaggatgtgtgataaatgctatggcaaaaatagagcaggatgaggagggggacttggagttctgggggaagggttgcagtatacagttaatatcactttacaaacactgaattagtgaccactgggccattgcttctaggggaaatacagggttaggttcctgctagcctctggttacaaacttctcatcaactgataatacataactttgtttttttgaatgtttctgcttaaagatgccttctttaccatatgtagtcaattcattcacattgaactcatggccaacagcaccataacttgtgcttgaataaagcttttctaacactgtgttttctccataaggctcatcacagccttccagtacttagcaacgctagacagcacttcattactgtgcttgggggtcacttttaacaatgaaatcgccaaaaacacaaaaatgtgaaaaacaaggcactaaataggtggtagaaaggatactcctagtatgagagctaaagcatggaggtggcatgggccttgtcggatctcacccagctgaggtcctcagcagcacttcagacttcattgggtgatgtacatattttgctgcacagaacttttctgtgaatggccacaaaagtgcctcaagtattgattttaaggttacaaataaattttagtgaggtgaatttgcaaatacacaatttgtgaataatgaggattgagtgtcaatgaatgatcagcataggcttcattgagaaggtgatatctgatgaagacttggaggagattatgggagtcatgtgggtatttggagaagtgtcccaggaagaaggtgcagccagtgccagaagtgtgcccaaagtgctcaaggaatagcaagaaggccagtgtggctgtcatggaatatggagtgagcaggagagtggcaggagacgagggtgggggagtggactttgtaagcgatagttcattctttggtttgtatctgagttagatggggagatgtggaagggttttgagctaagaagttttacagcactgtactgtgttgaggcagaagcagtaaaccagttaagagagtgccggcagtaatctatagccaagcctagatgtcatcatctgctcaccactaaaaagaactcttctgtacctcctggtccccaaatcattcccagatcacacatagagcacagttcttagaactcagccacctttctggaacatctcaaggagagttaaactgtgggattacagtacctgctgctgctggtgcctatctgaaaatgtgctgccacttgaaactgaactaattgaagctttagtttctctaacgcaattttgtactttgcattattagccttacacgttcaaattattttaaacacagggtgccagtaattagatagaagaatactcccttcattgtttgtctggataaaaggtacgtatgcttccttgctaagtttcagctttcttttttacaaccgtgatcccagcccttgaaagccacatctcattcacctttactgggaaggggaatgtggttaaatagattgcctgcatgaagatatttgtatcgaagtagagagtggaaataattcacgtcacgttgctgtactgctataatgattacagaatatactttaggtaatgcattattaaaggcatgcacagcagagcttccgtgtatacagtttgagtgtgagcttattagcatttcaggttgatacctctttaagatttaattagattccaggcttcaatcaatttattaaatgaatttcttgctgcttaaaaggtgtaatgtgttcatgacagtagcttttcatcactctcttctcatttcctcatgcactcaagcaaatctcagcttctgtcttggattcaaagccagagattattttccaaagatactatgctgtataaacatagcctcttttgtgcttggggatattggggctttggggagagttattttttatccacactgtctgacatgaatgcacttcttgtagatttaccaccagtaaatgtaactaatgcataataatagcactatcttctgtttcaatggccctttgtcactgtgactctttctactattcttttggcacaaaattcacaaacttttatttctgttgccatggggagagtgttgggactattcaaatagtgggaaattaaatacatcaaatcatagtagtgatttgcaagacaagctagagagctagaccataaagtgcgtaatttcatgatgtgttctgcatttgtttagaagagtagagagaacacttctctgagcccagcaagcgtcctaaccttgcctctgtcattaactgcatgaaaacccttaagtcagccgctggctatgattgcctcatctttgaagtggggcccttggtatcttgtcattggaaggcaggggagaggtctgatctagttccagcagtttcttccagctttaggttctgtgtatttgtggggtaagggagggtgatgtgaaaatagattagtttccatttatgtctaatagctatcatctaaataaagcctaaaatgcaaagtggaagaagtgatataatttatttgatgtagttttaatttgtgaatgaactagggcctcagattaaagtcagttgtgtccagctcagctaaggaagttatttttattatatggactgtttatctcctcatgggttacatttttgaaagttcagttggaaaggagattaaagacccatcaaccaaggtagaataatataagtataaatccatttctgtactataaatctttctataaggataaatcgatttttgccacagagcaaaagctgtggtcaaaatgctgtgaattcacaattcagggaaaaaaatactagttaagaagcagagcccagaggcaaaatgggattgtgactgattgaccggctcaacttcaaggacaatgctggttttatttttgcaagcctcaacatgggctaggttatgtaagaggcctgtgaaatcttaaaaactgattttccacctgcagattattcatgtaaggaatgctaaaccctattattaaccccaagcctgatttctcacagagaatagaatggaaaaatgcctgactgacatgtaggtggagttctaggatcttctttaatctggaaaatgtccgtagcctttttttgtcttttatgacattacagagtatagttctcccttatttaatagaacactcataattttgaagtatcctaatgatgagattgatattatgcattctgggcaggaatactacataagaagtgttatatccttgtcagggtatgtcatctggagggacaccatgtccaactctgcccattagagatgttaattttcatcatcctgaagaatgaattttgtctgatttatccgctgttaccatagctacttttttttttttttggccttgcagctaataagcaatatatggaagacacttgaagaccatgcaaatactctgctctttgtcaaaatgtccccctagacttagtgttatggattatttttgcctgagccagttttaccctgatggttgcagaatgattttctgactttggcacttaccagtggcactaggcattcttttgaaaacatgagctccttcccccaatttgtttctatatttattttctatatggatgcaccacttcctgtgtttcagcagtttacaattcattacttagttatgtatttattttttggtgctcacattgtctcagtcttagccaatgggagccccatcaacctgcttctctgtccttggacatgcccaaatgggatttgagaaggataccttatattaataaactctgccctgccaatcaccttttttccctctgtggtccctaaagtatccatacataaatttggggtcattgctggctatgtgcagagtaagatgaggtatgggctagaggttcatggggtctctttgctcctcactgagcccaaacttgaacctcagtgtcttgcctcgtgttgagcggctaccagaagaacaagagagagaagacagtacatgagaatatgaatgaggaaagagaaagaacagagctcaggcctccccttcccccatgcaggagtgggctcaagacctagatgggagtgagaataagaacacatctatatacctgactttttaacatgccagctcctcctcctagggtatgcagcacacagtgctacagtctgatcactctgaggcaagtcctcctctctgtagactcagggtcagccgcaatagacttcttcactagtcagccctggtcaaagctatagccttctttcttgttcttcatatttgcttaagaacaggacccatttcatctcttccttgggtgcttccagcagaactgacacacggacctctcccaccagcgactcctcaggtcctggggctgcttggatcatgaggtctctatatcagtcaattttcacaccactgataaagacctacctgagactgggtaaattataaagaaaaagaggtttaagatgtacagttccacgtggctggggaggcctcacaatcatggtggaaggtaaggaggagcaagtcacatcttaaatggatggcagcagacaaagagagaatgagaaccaagcaaaacagcctccccttatcaaactgtcagatctcgtgagactcagtcaccaccataagaacagtatgggggaaactgccctcatgattcaattttctcccaccgggtccctcccacaatacatggaaattatgggagtactgagatttgggtggagacacagctaaaccatgtcagtctcagactgtatgccctgtgttgtcttgtgtttccaaagggcgtctgataggttgtaatattgggcctcaatttcctttaagctaagagaaggaataagattaggatctgtaagatcgtcttcaacttcaaaactctctaattctgaaaattgaggcaggaattatacgtgcttgaattagtattctcacatatttgcccttactcatcatcctaaaattctgctattgtgtgtagcaaaatgggcacttttcatgggttttcttctttaataacttcttactactcccctaaatgatcccttttgatagaagtgtaatcaggatgttaattaatatatttgctagctataacataaggacataaaaacaaagtattctcacaaaaaggaaatgaatttgtgtaacagcctagtaaagggcatatttttgaattcctcctaagactacattaagcgaatgcttacccataatgaagccactccaatcagcttctcatttcttcttcattcattctgaaggattgttcttgagctgctgaaagtgctattcacattattaataattagagcttttgtctagatgctgggtccccttttcaagtattctgaccatctgcagctctgtgtacttacctgctagccacaggtagaactgatcaagcatgtgttcttttgagtggacagagtccacacccagaccttcagtgtgggggaagcacagtgtttcctatacgtcaggctaacttctaaggtggtttattaataagggacttgcccccagtattgacagttcatgtccaatagtaccttttctatagtttgtatacttacaaagtcaggggcttctaaaaactcaagaatcaagagcattcatctcaggaatcactgtcatctaaaatcaagcctcttgattatcttcctattggcttgagcaatgggcaggtaagtgtcctctcccctccatcattaaatcctgcacaggctgccagcctaaaggaaagcttgatttgctgattatactgtggctttgaaagctgcttctgctctctgaagaatgtgaaaaggagggataatgaagtccccagtcactctcaacttagagccatataattattttaaattgttttcattgtctgttcttcatacctgtgatgtggtttttcagatttcactcctaagatgtccagatcttgatgcagaggcataggcagtaggagaggacgggcaggaatgagtgttgccaggccatgcatctgtgtggctgtgcaaagagcttaggattagctcagacagcagagcagtagatatgtggacagagtgaggagctcaggagcaaaggtgaggacaaaggggttgcagaaccatgaggatgtggtttaagggaggccattctcagaataagtcaatactcaaaaataatgaaaagtaagaggttttttttagctatggaagagcataaacatggtctcctgcagagccccacaatacctacttgagcttctccgtggacttcacagagaatggtcttcagaggtatccagttgaaagactagggttattagtattctgaagggaagttcacagtggttgctacagagtcccattctcttccaaatttgttttgacagccaggaagcatgtgcatgttttaatatgtgtttctggtatgacactgagaggtatggataatgaatggcttggaagaatgatccagagatgctggtgaaggggttcaaaagatgttgctccaaaatatgccactttggcatattattttgagctaaaagaaactgagaaccagccaacataggaaatgttcttttacctttccctcagctgcctaaaataaagtataaattttcccttttataaaggaaatttacatttatgaaggaagtgctcattaatgttcattagtaaaggcatctgtagcaggaagaaagctaccaagagacagcttttatcacctaagggactttaatctgcataccaaggcaacctttattcaccatccatttcctcttctcacctacccataatttgccttcaccatccctcagaagccccaaacccctattcttctctgtagctcagatgatacattagtttcaatcatctggctgcttcctcgtgggattcccatgcatctgtatgtaattaaaattatttttcctctgttaatctgtcttatgtcaatttgtagaccaaagatcctgaagggtggaaggaagcaatttttttcccctctacactggagaatttgatgcacagcacagcaatttataacacagaaggaaaatctataaaggtcacctggctcttctttcccctgcatatctgcatcacagattccctcatctccttcaagtcttgactcacatatcaccttcaaagtgaggcttacctggaccattctgtttaaaacttcaactgacatccccactcaccccctcactctccactttttctttttactttttgctgtagcacttggccattccctaacacatgatatgctctagttatttattatacacataatgggggtgaattgttgattgtctgcctttccctgttggaacagaagttccatgagaatgaagatgttttcccgttttattcactgatgtacaccaacagcccaaacaatgcctagcacccagtagctgttcaatgattattcattcgatgaatgaatgaatgaaataagaggtaaaacatggccaggcatggtggctaatgcctataatcctagcactttgggaggctgaggtgggaggatcgcttgagcccggaagtttgagaccagcctgggcaatacagtgagaccttgtctctacagaaaatttaaaaatgagtagagcttggtggtacacacctgtagtcctagctactcaggaggctgaggtgggaggatcatttgagcccctgaggcagagatcgcagtgagccaactgtggcactgcactccagcctggacaacagagtgagaccttgtttcacaaaaagaaaaataaggtaaaacattcacagacatagcaaagaagccaaaatggggacctggagggaactcattctccggtttggcttaagtgagaaaggaactttccatactaaaaagtggacaacagaagcaatgctttgctgaatggttcatgacaaattctgttaattgaaaagtcttaagtaacgttctttctacctgtatgtgttcattcaagattccagctcattgacacaaagtcattattttgatatcattcatttagggtacaactttatttaaatgcagtgcaagttatttctttaaaatgtgctgatttgtaaaatattgtgttgttagtaaatagttctctgctgtccctaaacagctagtagcgggcggggatcagggagtggggagattaaactggagggaagagagttgaagaaagtaactggagacagggctaagctgggattcttcaggaggagtgacagaaaagtcattctgaggctgtcagcttaatgccataattgccttacataatttaatacataaatgctgaataaacaccaattaaagccttcatgagagagaagcaggctaatccaaggatcttactttgggcaccttgacttgtgctcataattgtccccacgttgttattatttttgcagcctcctccaagtagcttgtcagttccccttgaccagggcctcttttggtcatgttctcttcctattctatagcaactggcatttggtgttgtcctggtaaccatcaacttctatgtttgcatttcttatttggagcttgaaaagctgaggttgtaggttaggcttcctacatgctgaccatctgtgaatctgggaaaactgcccatgaccttcttaagcagagcacatacctttggatacatgcctttagtgaaagaggagctcaggagaatctgcagatgctcaccctatatcacttccaggtatgcatcccccacagcccacagtcccagtcctttgtgaaggccataacaacatttatgattatttcagatcagttgagtgggcttgtctgtaggaggcatagtcctcaacgacttttacatcttaacatagagcagctattaactgctgagatatagaaggaagcaaagaatttagtgagcccatttgagttaaaaaagaaaaaaaagtaactttaaaattcctcaattgtttttagatctgttaaccagtatcatgtcctctggattagcccaagtttggcatctgagctttgctccctgatgtctgatgaagtggtctggactccaggctcataggctgccaaggccttcaagtcatggagtgggaccaagtaatggtgtagaagaggggagagaaagaggcttgttaaatcagggaataactctggcctttaacacattctaaagagaggaaagatatctctgagcatctcatacatttctgccaccagcatatcttctctaccagaaataatgaccacacatgggtatgaatggagtgatgtctctactgatttccttggttctccccatttgaagttgaaatgaccttacttagacttggttcctgggagaattctctaggggagagggacaggaaagctgaagctcaaaaatcaaacctaaacattttcttgttcacccaagaggtgatactgatattctggccaaatcaaacaccttagcaaacttcccaggtttgaaatccccatgtgtcctcaggcaaatgagattattgagattattaatcaaaactaatgttttcacaaagggaacgaaagacatacctgctgacctgatggtggcatcacaccagaacttgaaattgaagcctgtggcatttaacctgggtgtcatgtcttactttttgtcaaatgtaaactcactaataggaaaagagactttcactcaagtgaaagttttctgctaagaaaaccattccaaagtagagatttttacttttcaagtagaaaaatgtttcaactatgaaattgcaaaaacattcttttacaccagaagacaaaaataacacattgtaaggagcataggaaaaaaaatccatatggaaaaagttgaaacagccaatatgtgtttaagagtctccattatgcagccatctcacataaactgtctgaagacaccatttttgtgagacacacacacacacatagtgtgtgtgtgtgtgtgtgtgtctgtgtgtctgctggattgaaagtgggaagaaatggtggaggggcagtgatttatgtgctgctaagtcctctgagaccctagtcggtgtggttcaagcctgattcaagcctctcaagctgagctttgcaggcccatcaccatctctcggaactggcctcccacctcactcttgagccctctccctctgtgctgtcacaaatgctgagtgaaatttttctagaagataaataagtctctatccagtcattgctctgcctaacacccgtggctccctagtgccttaggataaactgcaaactcctatgaggagcaagttcagagagctggtgggaaggcagtagttacgactttgagccgtgaaactgtgcttcctgggttaggaccttgttcatctacttaccagcggagaacccttgggcaagttattatttctttggttttcagcttcttcatctgtaaaagtgggataatagtacaaccttgacagtgttgttgagagcattaaatgagttctaacacatactaaacacctaataaagattcacttattgtgattacttatattctgctcccagtttgcttctgcccctattcttcagtcacacccagctacttgcagagctcttccctaccggcattcacctaatggaccatatttctttgtctgtatttagcttttttgtttgtttgtttgagatggagtctcactctgtcgtccagggtggagtgcagtggcccgatctcagctcactgcaacctccacctcctgggttcaagcagttctcctgcctcagcctcccaagtagctgggactatagatgcacaccaccatgcttggctaatttttgtatttttagtagagacaggattttaccatgttggccagactggtcttgaactcctgacctcaggcaatctgcctgcctcggcctcccaaagtgctgggattatgggtgtgagccactgcacctggccctgtctttagttcctataagctactttctctgcctagaaagtaatcacacacacgtacccacctgcatcctctacatccatcttctacatcctcccactaactctttcttaaccttcaaagttcagcttaggtcaagactcttttactctgaacagcctaccagatatcactctattttagaggctcctgtagctccagttcatctttctctcctaccatttatgatacagcacaataatggtctgtttacttgtagttcttctcccagtaaacattccctcactccccaagccccatgaaagagggattgtatcttgatcatttctatatatctcctgcctgtatattgtgtgctcataaatgctgcatgcatgagtggatggttagatggggggaggcatggatgagtgaaggcactttgagagatactaccaaagtagaatgtgtctaacgtggttgtaatggttaggggtttggaaacctatttgattaagaaataggtcaaatatttgagaaatacccatgctctgtgaaagaagtcatgggtaggagagggtttaaagagctgtctttggatatataaatggctagagtgtacacttacttattctgtattgtttaacatggcagaaccatgaccaagactgggatgaaagatacaggccagtctcagctcaaaataaggaatataattttaataaagggatttcattttagtagcaactggctaggttatagcaaaactctgcaccaaaagaaagctagactaaatgatctctgaattctactctgtgcattagtttttgtcttcttcctgtcagtggatgggttcagatgccaaatgtcttatcagcctttcgggatctcatttcttagagggctactgggctccaattcttaaatagttcccttttcccttttcagcctgtgtaccctcatttttctactaatgccttcaaagtttacaaaatatcagcagttgaaaggatcaagtactttgattctagttcagccaaccatctgaatatttggtttcctttataacaccctacacagtgctaagtttgcaacttttagtcatccaagcagagacagtaaaaaagcagggagatctatgggtcttatggtagtcaagattttccagagaaacagaatcaataggttgcactcacatgtatgtatgtgcatgtatatatacatacatatttatatatatttattcattttaaataattggcaaattcaaactctgcagggcaggctggcagactgaagagccagggaagagttgatgttctacttttgaatcaaaggtagtctgcagacagaattacttcctctttggggtcctcggtcttttctcttaaggccttcaactgactgaataaggcccacccacattatggagggtaatctgctttattccaggtctactgatttaaatgttcatcatattttgaaaataccttacctgcaacatttatactggtgtttgaccaaacaactggtaccatagactagactagttgacacataaaattaatcatcccaggtctggagtatgagagagaggtcaaagctagaaatacaaatttgggagtcttgagcatataggtagcacttaaaatgttgagactgggtgcggaggttgccaaaatgatctagtgacgggaaacgtctcaaggcggcccatttggttacagtcataattgagctgaaatccacctgaaaaccctgttttctggttcattacttacccatattaaacttaccggttccttgcatcaccacctcaaatggtattctttcacatccccacctcagcctggttgttatcatcagacatgtctttctttgtcaatctgtctttaaagtaggcacttgaaattgagggtgaccttccaggtgtggtctgatgaacacaagacatgctcaattcttttgttcttctattgaagcagataaatattagaatttggttggagggaggtgggttagaatactgttgattcattgagctcactcttggcttaaaggctaaatctcaatctgcttctgcaatatcaccttgtctctatcctacatgtgcagtgctttgtagtccatagtaaagacttgggctgttcctctgagtgaagtggggaacaattgtagcattaagtagaggagtgatgtgtcttgggtctttaaaggatcattctggctgctctgttgagaatggctttttgggagcaaggggaaccttttaggaggctattgaagtggaagtggtgagaagtcatcagattctggatatatctcaaagtagagctaacaggctctgctgatgggattggatgtcagcgttacagagtcaaatatgactgcagggtttttagcctcagccgctggtaggatggagttgccatcaactgagatagggaaggctaccggaggaggagatgcaagtggggagatcaggagttcagtttgaaatagctttttttttttttttttttttttttttgagacagagtttgctcttttttcccaggctggagtgcaatggtgcagtcttggctcactgcaacctctgcctcccaggttcaagtgattctcctgcctcagccttctgagtagctgggattacaggtgtgtgcaccaccatgcctggctaattttttgtttttggtagagacagggtttcaccatgttggccaggctggtctcaaactcctgacctcaggctatccgcctgcctctgctcccaaagtgctgggattccaggcatgagccactgtgcccggcgtgaaattgctttttgacatccgagtagagttatttaaaaagtaaggagatgtatggctctggactgcaggaaagagccctgagctgggactcccaatttgggagtctttagcataggtagcacttaaaacccagagactggatagtacgactgccaagggcatgagtacacagaggagagaagaggaccaaggaccaatgagccctgtctctccagcagtgagaggctggaatcagcaaaggcacctgagaaggagcagccagtgagttaccaggaaaaccaagacaacgtggggtcctagggactcagtgaaaatcaaggaggatatctatgtaatagattataaactttatatatagtatagaatattttatacatctataatatataatacatgcttaatatatattttccataaagattttatataaattataatatattacaaaatttatataatagatgacttctggggaaatacagcaaaggtggcttagtggaaagggcaccaggaatcagaaggcctgagggctgggctcagttctgttggtcttagttctttaactttaggcgtgttaaatagcctttttcaagcaacatttttgactcatcgggaaagtagagattttaatcctttctttactctcagttattgcaagaatcaattgaagtaatagatatggatatggtttgttagcaataaagatcctgtcctccctccttctccctctttctctatgtatgtataaatgtatgtatagaaggaattccagatatttgttacaactaatgcctattggaccattcagattatgacctattgtaggtcataatcattttagtgggtttcaggcaacatttgaaaatggaataagaccaaacgtggtggctcacgcctgtaatcccagtgctttgggtggccgaggcgggcagatcgcctgaggtcaggagttcaagaccagcctggccaacatggtgaaactccatctctactaaaaatacaaaagccagatgggtatggtggtgcatgcctgtaatcccagctacttgggagtctgaggcaggaggagaatcacttgaacctaggaggcagaggttgcagtgaaccaagatcacaccactgcattccagcctgggcaacagagtcaaactctatctcaaaaaaaaaaaaaaaaaaaagaaaaagaaaatggagtagaaaatatcagtattcatgggttagaaagagtaaagttttttttttttttgaatctttttagttatatacttgcgttagttatcaaattactcccacacttagtagtttaaaacaataagcatttgttatttagaggggtgatgtcagccagggctgcagtcatctgaaggcctcgctgggctgatcctcttccaggcctatgcctgtggctgttggcaggaggcctcagcgtctcaccacataggcctttccttagggctactcatgacatctttgctggtttctaccagaacacatgacctaagacagaacaagagagtgcccccaagacagaagatgcagtatcagatcaaaagtaagagtatcagatcaaaagtaatcaactctgattctcttctcttctgttagtcacatctagcgatcctgttactgcatgagagggactttacaagagtataaaggttgggaggtggggattgtccagggccatcatggagactggccatcacaacttctataactgggttgagttataagatacatctttaaatgtgggtcatgtgagaaagtgtttaagaaacactgctgtacagtgtctaatactgtgcaccattaggcagaggtgtacattagctagcagaagcccatttaggaagctctgctgttgatgctctctacacccatggttaattagctgtgactttaagatcgtgaatatgaacaccagtgacttttacagtgaagcaagataatggaagtcttaccgggctatgggggactgtttgtccttaactgaattgagcctgtactaatgtcctttcagaatccttctgtctgatttctgtagttctataccttttacctatctggtcatctgccaagtatatctgctggtggtgggttctcacttcaaatctgtggccatattttatgtacaactgtgtggcttgtttcttacagaatatgttacaggggtttgtgatagcagttatacttttagctgatctttctgcctgtttattcttcttatgagtgtggtctgagtaatgagcttatgggaaattctacctggagataaatggggtataattaaacttttatatcttgagaatagggattattagaaacataaaggtatgccctacttaaaggaatcttgtagaataattacagacatgatttgtgtaatataatttgatatattccctggtgtgaaaacaaatctgttttagctctcctagccaatattttttgtgttgactagtgtaaatgactgaaaaataacaaattatttttgaagtgctaatagatcctaagcaggctagaagtctctagttaaacagttaaaagaccagtagaaaacacaacacaaagtaaaaacatatggcctcgggttcttaacttgaaactgtggcagtttcaaactggagtcatttcttgatataaagtgagccctactaattaattggaaaggaactattctacaagaaagtttcttggtttgatgttgactgtttgctcttcacactcctactacttgtcagccctgcagccacaggtcttctctggcttaagattttacacctgagggcttctctctatcttccagtcacagtggaggattggaggatgtgctgttttcagtgggctcgcaggtctgtagaggcccatttgttctcgaagagttgctgctgctggaatgctgggctgactctaatttttttttttttttttgagacagagtctggctctgttgcccaggctggagtgcagtggcgcaatcttgactcactgcaacctccacctccctggttcaagcaattctcctgcctcagcctccagagtagctgggactacaggcatgcaccatcacgcccagctaatttttatatttttagtagaggctaatgttggccaggatggtctcgatctcttgaccttgtgatccgcccgccttggcctcccaaaatgctgggattacaggcatgagccaccgagcccggccataattttttatttatgtatcagttgaccccctaagctatcaacttctgtggtcagggactgtccatccctgtacctgacagcatttggctcatgggagaagctcagtaaatgtaaagaaattacattttttattctcttgcatggatttatgtccagaagaacaaggtttggggtacaatatgcaaatgatactacttttcttagtgtttctattaaatgtagtaaattttaattttcctcgaagtacgtgaaacttaaaaatttaaatgttgagacaacagtatgattcttatttcttgaattaagattgatttttaaaaatctattaaaaatccctgtagcatttttggtaacattcagtgggagaggaatttagtttttataacacagatagggaccactggtagcttgagtgagcaggttgagaaccactcagctagagaacactgaatgcccctttatgttctcacctgtgcatatccctgaagacctggcaacattatcagtcagctttatgaagtgacatcttctctgtccagaatgctgtctgagcaatgggtggctactgaaggtgttgtaggcctggcccactcacccggctttagtattaattataactaggaaaaacaaaagcaactgttggcatagtggattatgaaaggccaggcactcttttatatgtattgcttccttgccttgcagtctgtttttttttttctttttttttttttttgagacggagtctcgctctgtggccatgctagagtcagtggtgcgatctcagctcactgcaacctccatctcctgggttcaagtgattctcctgcctcagcctcctgagtatctgggattataggtgcccatgaccgtgcctggctaatttttgtatttttggtagagaccaggtttcaccatgttggccaggatggtctcaatctcttgacctcatgatctgcccgcctcagcctctcaaagtgctgggattacaggcatgaaccaccacacccagcccttgcagtttatttttatttttccttgcagcctctgctgtgcgaatcagcctataccctgcttagtcctgagaagaccatctgtatcacactgccttgaacctcaagcctcaagctgtgacagagccctgcagaactccatcctcatccatgtccctctggtctctgcttcccattccccacacctgcctatgctgcattgtgacattgacagttcacaaattgtggctccttaatttttttcttctggacttcagtaaaaataatttgatggaaagctatggaagtggccgggtgtcatggctcacgcctgtaatcccaacactttgggaggccaaagtgggcagatcacttgaggccaggaattcaagaccagcctggccaacatggtgaaaccccatctctactaaaaatacaaaaaaattagctgggcatggtgatgcatgcctttagttagtcccagctactcgggaggctgaagcatgagaatccttggaacccaggagttgggggttgcagtgggctgggattgtgccactgcactccaacctgggtgacaaagagagactttctctctcaaaaaaaaaaaaattatggaagggaaaatagccatattcacttagattagctcagccacttaagtgaaagagatgcccaaggagacacttagacattttgctggtaattagtaagcctaggagaggcggctgcaaagagtaggagagcttgttgttttaaaaccctgaaactctacttatatcttagtcaagtagggaataaataatcaaatgggaattcttaaagctccaatatatcatgagcatgagaataaaactgagaaaggaaaggacacaaattagaatgagaatgataataaagtcaaatacattttcaaaatttgtaagtatcatttttagatataatgactgttgtcttttgagtcctggttatggcaaaaagtcttttgtttcaatataaaaggagggaaagcctgtgtacctcattccagttaagcaacttttcaaagcagttgggtttgggttaccaacaggggcaaggccaaatgttcaactattctgagaggtgaaactagatccttgaagggatcatgtgatgtctacttttcaaaccataacgaacagattcatcaaacacatgtcatgaataatcacttgttgtgatgatgtattcacaaactgctgaagggtagaatgaggttttaataagatgaccgattataaaaatatacatgcaggaagatgctcagcttttaagattgtattaataatagccttatattagttttgtgttgaattcttgtgacctgctggcacctttttggtaagtattgactcatttaattacccagctcccagaagtcaacccttagaagcctaacctaatttcttttgtttcctgaagctctgggtatcttgggtgcagtttactctataagcagatgctgaatccgctgtctgtacgtaatttttggggcatcatggagaggaggtgtaagtcatatatccttgttctctgtttggagatactcagtagtgtggttgtcaagggcaacctgggcagaaagatcagcagggctctgtggttccattagggatgtagacttctctcctcttaatcttgctgcttttggttgccttctgggcatcattactgaagtgctacttggaagaaagaagagaacatttgtcagcatctcctgtggccctggagccagctccccttatcagtcaccaactcaagtgatgttctgtggggactgttgccagttggcttccatagtgaggatcctaaacactatggaattgacatattacctgggaagtacctcccacaccaggctgtccaacttctttttctgcaaagcccagctagagcatcagctcctctgggaagcccttcctgcgcgcctctcctgccctcccccatgctggtaaaatgtaaacaccagctcaagacctctcacagcacctcatgcttatctcttctttggcatttgtccctttgttctggattcattgcatcacttatgtttcctccaccagactgaatgctggaggaccacactctgctttgttcagttttatttttctagcctctaatgccatgcctggcacatagtaggcactttaaatattcattaaatggatttctttgccattcttatttttgcccatagactctgttgccccaacctctgccctttgcagatgcttgaaatctcctggcacatctgtttctgtcctatctcctccccgttctcccttttgccgcagcagctttgccctgcttcatcggttgcattggagtttgggcaggaaaatagaaaccactcaagatattttgggtggcaaggattaactacagggaagtggaggcacacaaaactcatagaggggtggtggagtggagggttggaaggctgttggaagctgctgctgctgatcttggctgcctgcagcaccaaagtggggtctcaagagtccctcactgcagaagcagctaacaaaacccatgtctgcaatctgctgacgtccacagtcctgtccccagctgctcctggggaaaaatggcttttctttcttttttcccttcagttcttatgagagtgcctctcattgggagaactgaatcagaagtcagctgaaaagggaatctggaaagtgctagttcataggcatttcacctctgaggtacaggccagtgcttagaaggaaggaatgtccacacacaaaaactggcacatcaagaacactgccttgcttcatccgagaccttctccctgagctgcctacccccaccctttttttttaaacaaagctctgcccatcttattggatgccttaattttgttaatatgtgggaaccctcatccttagtcctattccagcaattagcaacccctctgcctatattttaggtctcctctattcttcttctttttttttttttttaagtggaatgttattatattttgcttatcagcggttcattgtttttaagaattaaatctttccggccaggcacggtggctcacgcctgtaatcccagcagtttgggaggccgaggtgggtggatcacgaggtcaggagatagagaccatcctggctaacacagtaaaaccccatttctactaaaaatacaaaaaattagccgggagtggtggtgggcgcctgtagtcccagctacttgggaggctgaggcaggagaatggcatgaacccgggaggcagagcttgcagtgaggtgagattgcatcactgccctccagcctgggcaaaagagcaagactcagtctcaaaaaaaaaaaaaaaaaaatctttcctagtccagaaattataagcataatcttttgaaaagtatatctcatttaatttatagtacatatgtcatttgaaaatcgctgaatttttagtgaggcaatctgagtttaagttaaaatcaggtcccttattggccgcataattgtgggaaaatcattgaatcatgcattcatgcatttacatatttatcaggcttgtactaagtgctaagagccaggctctgttaggtaccattggctgttaaatgcctgtaatatacaatccctattttccttatagtttgttaagaaatgtttgtgatgatgctttgtaaatttaaagttctactgaagtactaattattattttcttaatagacaacaacttataaattcatgtttagaattactttaacagaatttattgtagttataataggtcagcaaagtggtatcatggtcatattaaggcacaacacctggagtgaatcagcctcaattttttttttctttcttgctgtctatatactcaagatttaatttagcttatactgtgtactcaatatactgtctatatactgaagatatttttttttttttgagacggtctccctctgtcacccaggctggagtgcagtggcacaatcctggcccactgcaacctcctgggttcaggtgattctcatgcctcagcctcccgagtagctaggactacaggcatgtgccatgacacccagctaatttttgtatttttggtagagacagggtttcgccatgttggccaggctggtctcgaactcctggcctaaagtgatttgtccactttggccttccaaagtgctgggattacaggcatgagccactatgtattcaatatttaattttacttagcctgactgccttgcccatgctcctagcaaggcaggggtgaggtttaattgtcctactagaacaggacacagtaggtgagaggtaagtccccaaaggaagccaggctttccctcagaaccaacaagcaaacaagcaaaaccaacaaatgcccacatgtaactcctatctacttttctctcatctgatgactttgctttatactcttgaaaattttctctccaccaaatcactgccatttgcattcatcatcttctaaatcttctgtacctatcacctggtacaatggaagactttcccccaaatgaacaaacaccaaccttgtttgtttcatctttgtttggtgactgtggttcctcttctccttcaggacataactcttcctcattagagttatccacaccgggtagtgtcctcctctccttctcatcctctcttcacttggctctagtctggcttccatttcccccactcaatgaagctactcctcaaagttgccggtgacctttcatttggcaaatgtgtccaacagacatttttacatgaagagataaaaagcaagatgaatttagacccttatacacaccccacgcaaaaaaattaactcaaagtagatcatgaactttaagtgctaaactatgaaacttttagaagaaaacatagaaaattttcaagatcttgggttaagcaaagatgtcttagatataacaccaaaagcatgatccacaataagaaaaacatcaatcaattggatttttgaaattcaaaacttttgtgcttcaaagacattttcagaaaatgaaaagataagctataggttgagagaaaatatttgcaaattacacatccaataaaggacttgtttccagaatacttacaagggtaggaacttttcttgttcattgctgtatcctaagcatctcttgtagctctattgagcatctagaaggtactcgataaatatttcctggataattatagcattaatatagtttggagaatactctgttaggattcttaatgacgtctaaggaggagagaaaacaatcttgaaaatttgtagaatgtttttgaagcatttgtacctactacatttattcccttttctgctcttggtatcattgtatccatgccacagttaagaaaacaaggccatggagggattaactttttgcctgtggtcaaatgctgttacgtggtagagccagaatccagatctcgaatttctaattctacattcagtgcatcatgatttccactgctgttggggagatgtcttcactcctgagctgatgatgcctggaactggtgccttctcacctttccttcagcagtgtgaaatgcccagatctcaagcttgtgggccattttcccagaccctccttcctgatgatctgatggcagacacacttgtctgatccataagagcatgtcatgtggtaactcaggactgttttcaccgtgtttgttctgaggagtttgtcctcccagggcttgttttctacttttctatcagaccttggtatttcacaaaacgtgtttgactgccaactgggatcatgctagtctaagtgtctaagtttattttcacttcacttctcactatgttcccggcgtagctttttattcttttttttttttttttttgagacggagtctcgctctgttgcctaggctggagtgcagtggtgtgatctcgactccaacaaccacctcctgggttcaagcgattgtcctgcctcagtctcccaaatagctgggactacaggtgcccaccactacacccggctaatttttgtatttttagtagagacggggtttcaccatgttggccaggctgttcttgaactcctgacctcaggtgatacacccgcctcggcctcccaaagtgctgggattacaggcatgaaccaccatgcctggcccaactttttattcttgactgtgagcaggttgagacgtaggttaacagatggagctgaagatggtatgatatggtgccagttactatgtgatgtcatcaggaagcctattctaagaattgtgcctcaggcatccttagaaaataaagatgttgcttgagactgagaggagggcagcattgggacactttgaacaaaaagctggggtctagggggcctggtcgatcagcctcagctctgctgtttgttgtatttcaattatttcatattccttattctctgcttccgaattagtcaagtgaggaggaggttagggcagatacactttcaggtcttgtctgctctccaaaattgggttataggccagctgaactaatcagggcttcttgagtctaggtataaactttatcaccctagcgatgtgctttggtttttgcccccagctgtgcaaattagttctcaaacttcccagacaggaatgtaaaggctgaactcaggcagcctattaataggctaaacaagcgtagtgataaaagactgaagattgcaaatgggagaggtggaggcaaggattgacagctaaattttggtacattgtctacatgctgccctgcctgtgtcatgctaagtggccatgacaacagtggttctaaaacatacctcagttgtatggtatttgccactcctggccatagtctgttgctgtttttatccctagcttccacccagccgagattagtctgggaggaaggacagtaccccaaagggcaggcagcctgttagagcagaacaagtcctggaactggccatgggttctggtctgagttctgccatggacatggtgtgtgggccccacccctcctccgtcaaagaagcagttctaagctaggtgatatacaaacctctgtgctctgtgagtaagcatatgggcagcaccactttgtcaggcccaacaagcctaattttgatgcactgtgaggctctaatgagtacagcagtcataatcatcataaataaactgccagggctgccctggatgtgttagcccgggcacagtctactaatttgctgatggtaatcagacaggagctgctgctgtgggagggagcattcatacttagagatgctgcctgaaagtgcctgaaacacgaacttggaaacttgaggcttaaaggaatcttaaaggtcatccattccagtttttttatctcaagctgaaatctgcctccccatggctgctatcagttgatgtgcagacagcaaaacttgcatatcatacacacaagattttctgtttttaatttctggaaggagctaagaataatatgtacaggatccgtgttccttatgtctcctcatgaggaaaccctggttttctgtgggctggttagttgtgagactatttccttaaaaggtgataagaatgattgtgctatagtttgatcactatcttatttcagaagagaacccctatttttatctgtgggtatttattttatgtacttacataaaataatcagtgtattaaataactactttttagcctcttctatgtgcagtgtatgatgctaagtgccagagcagacagaagcattggtaccttattacaggcctatcattcacacattgcttcactcaacgacatttattgctttccggaaggctctggttcttgcccttatgaagtttttggtctgttgtgggagagaatgattgattagttatcagtcacactgcattgaaattattgttgactttgccatccctttaggctctattctccctgaagcagaggttatgtgctgtgcattactgaatttccagtatctagcacagaatgggcacatagtaaatatttgttaaatgagtctgtggttgaatatatgaaggaaaaagcacagacattggtgtctgctctgagctagatcctgattcagcatttactagtcatgagactgggaataaagacacaagcctttataaaataggacctatttcacagggttgtggtgaagattaaaaattgagaatatacagagtgcttagcccagtgtttggcatatacttctaagaaaacaatgtgtattcttttcctactgtagctccttaaggtgctttttccatctgtatacaaaaactaaagaaaacatttttcttttttctttttttttttttttttttgagacggagtcttgctttgtcgcccaggctggagtgcagtggtgcaatctcggctcactgtaacctccgcctcctgggttcaagtgattctcctgcctcagcctccctagcagctgggattacaggcacccaacaccacgcctggctaatttttgtatttttagtagaaacagggtttcatcattttggccgggctggtcttgaactcttgaccttgtgatctacctgccttggcctcccaaagtgctgggattacaggcgtgagctaccgcacctggccatgagaatatatttctagagttcattgcattgctagtgttttgaaattaaagatggccctacaagggaggccccacccctgaactctttggaaggaacatgagttaggtttaccatggtaaagaggaaatccatactatacatttcaaaatcactgatggagtaaatttcaaatattctaatgacaaaaaatttgaggtgatggatatattaattagcttgatttaatcattccacattatgttaaaaaatcatagcatggccgggcatggtggctcatgcctgtaatctcagcactttgggaggccaaggcgagttgatcacgaggtcaggagatcaagaccattctggctcacatggtgaaaccccatctctactaaaaatacaaaaaattagccaggtatggtggcatgcacctgtaatctcagctgctcgggaggctgaggcaagagaattgcttgaacctgggaggtggaggttgcagcgagccgagatcatgccactgcactccagcctgggtgacagagtgagactccttctcaaaaaaaaaaaaaaaaaaaagtcctagcatcacttcgtaccccataaatacatacaactataatttgtcactatgtaataataatgataatagaagaatgaactcatgattctgaagaagctgcaaaagcccgcaaattctggtaacatggaactagacctctggttgggtagaccacagttttcttttggatagagtcactttctcatatgatacttaataaaattattaagtaatgatgaaataacatttttaaaatatcacataaatttaaataacagtttatagttttaaatatgtttggtttatttttttctaatgggaacaggatgaaaggcatatacattctttaagccaaacctttagcgtcgtatcaaatatgttgcctgacttattggtggtggagttggtaagattaagataatggctcttatgaagagcagctttatgaaccacttcattcttccagccagtaagatagctatcactggttttatcatgtggtcttgattttcattttatatatgttcactcatttacagctcaaaaacaaaatatatgaggaaaaactaatccgagttatagaaattagattctgattttaggatgcactgttaatttctctctatacacaaaaaacatgaacttgtttgcttttcttttgcaaggagtgtgctttttatctttcatttttaaaatgttgaaataatcttaaactcacaaacattagaagcacagtacctatgtaacattttccccctgaattatttgagattaggttgtggacatgaagcatcatcactctgagtacttcagcgtatgcttctaaggacactttcctatgtactaggttggtgcaaaagtaattgtgggttttgtcattactgtcaatggcaaagaccacatgcaattacttttgcaccaactgaataactgcaatatgcagattgaatatcccttacttgaaatgctggggaccagaaatcagtgttttggatttcgagctttacagattttggaatatttgcaattatactagttgagcatctcaaatttaaaaatccaaaatctgaaggtgctctcatgagcatttttatgagtgtctcattggtgctcaaaaagttttagattttggagcatttcagatttcagatttttggatttgggatactcagccctctaataacaaaactcaggaagttaaggttggtgcattcctaccatttattcctcaaaaccaaggtactgttccctggggggtcttctggctaatggagactgtctgggctcaggtgttagttttacccctaactaacaatcacttaacctctctatgcttctgtttcttcctctgtggtgcagatgataatagtatctatctacctcatagggttattgcaaaaataattgtatgtgtgtagaatggatgagtgcctggcacatgctaagcactgtgtgtgtgtgttggcttttactattaacatccccccttctccactctgtgtgtgctgcactgtgcctgcatggtgagaaactataaccctttactctccactaacctcgcctgcctttctcacatgatccaaggaaagtgagaggcagcattaaattaaagcttgtgtatattctactcatatcttgtagtcattgcaaaggctcttatatttacaggtgatttttaaaaaacctgctctttgtcccacctctggagttagaattagttctcagatacattcatcctttcatgcattgggtgtctatacagaattgtcattgggaagtattttcaaagccctaagatgtgctttgcaaaggaaatctttcagggctgtaagaatggataatttcctggctattagttgaataagaaagacatattttgcctttcagagattgttatattttataatgcagaaatggttttgaatatatttagtttttaaattttcagtaggtggtgtgctaaagcttagtgtccttagctaggtctcatgttacaagtagaggaggagatgggagagggaattggtttggctggccaccatttctatgaggaagggcacctggaaatggaaagaaatgaattgactaccacatcacccccggaggccatggctaggttgaatgagaatgatggtgttggcatgagttggatgaaccttattttttaaaaactgatagccatccagacacaaaagcacaaatactgtatgactctgcttacgtgaacttccatcactttccagagcctggctagctgagacggaggaggtgggcggcacctggggagaagcaggtgggcttccctggagcagggcagccatgctgggagaagcagaaatgaggtggaagtgggaagacatcagcttttaacatgaaccatcattttcaattagtaataatgaaaggcagtgagaaccctgcttttagcagggtgcttgggaagagcaagtaattcgtgcattttagggttcagtttgatttccagctttttttctactggctgtcagctctgggcataccagtacctgcctcaccagcatgtatatgtgagcacaaaacatagtacttgccacattctaaacaataaatataatttctcattattaggtttttcattactgtttcagtgccttcctctgaccccactatatactgcggatctctgtgatttcttccatgtctgctttgtcctgtgattcccggaatagagtctgttggtctctgtcgctaatgtaattgaaaaggctctacaagctttggatgagtgaaggaagctgaaatctttgttttaatctacacatacttctacctcccatattatagatctggcaaccttaaaattgctgtctgtggtgtggatatttatttatggggctgaacaaagtagccttggttttggttgagagaagagatcatttctatttttaaaaaatttgtgttaaatataattttaggaagaacttagcatcttatccaggtcaatgtaaaatcaaatgaaacacatcagctctccctacaggtagatctctccttagagaagagctctgtgcagaagacttatgaataagtggaatttatatatctcgaatcccgtttttcctgaattatgtaattattttaggtcagtgatgtagtaaatgaggtctgtcatgttttggctttgagtttctttattctcacctatgctgtgtccattgtctgtaaagagatacttaagcacataaaataatcttgtcatttaaaggtgtcccacagggaatcttagtgtcagtaatcacctgtcatatgtcaggtggcgaggtaccaggcatgatgggatgttccagggatgagtcaagggtgtcgccggaagctagggacaggcagggtctggacaggcgtcagaccccccctcgagggtgaattcctgtgtccattacctcttgtctgaaagggacagaattaactcaggccctactcagtcagatggccaacccaagaggcgagactggtgggtgggatgcaaccaccacccgttaggtgttgggagcagtgattctgcctgggggactatatcatcatgattctggccgcctggtcttttttttttttttttttttttttttttgagatggagtctcactctgtcgcccaggctggagtgcagtggtgtgatctcggctcactgaaagctccgcctcctgggttcacgccattctcctgcttcagcctcctgactaagtgagacttcactggccacctggtcttcttactcacagtccgacccaaagggagagaagggcactggctacatgatcagaggttcaggaggaacaagcatgctagttagagaaaccaaggcagtgtcgtttatatggactgtaccagtttcgtggtgtcaggaaaaggctgtgacttaaagggtctgccatagcccagcgctatgggatgcctggtgtgagcctcaagcacaaagtcaggctccccagctagcgcatggagttgcagctcttcaaatcccctgctcagggcagacccagagatgggacagggttgttctctcaggtggaaagctccaggactacaactaggtggggcttggaaggccaaggttgaccctccactcactgccacaccagcctctccctgccccaccccccctcacctgcttccctttggctagtgtggtgttgggcttttgaaacatatttcgggctgagtgcggtggctcacacctgtaatcccagcactttgggaggctgaggtgggaggattgcttgagcccatgagtttgagacaaccctgggtaatatagactatgtctctactaaaaaaattaaatattagccaggcgtggtgatgcacacctgtagtcacagctactctgggggctgaggtgggaggattggtttaacccagggggttgaggctgcagtaaatgtgatcgcaccgctgcacttcagcctgggtgacaaaggaagaccttgtctcaaaaaaaaaaaaaaaaaaacccatatatatgtgtgtgtgtgtatatacatatatatattttaagtgaacatctgagacacgaatattacaaacggactcatatattggaaaagtggaaggtacctgggagatctcctctcatggcctatatttctagagagagcttacacttgctgagacacttacgctactagagagcagtgtttctgcaccagaatctcctggagagcttgttaagtttaattgccgggctccttccccagaattttggaattggtatgtctgaggtggggcctgagaagctgcgattccaacaagttcccaggaatgctgctgctccagcagccacatcttgagaactactgtggtagagcaatccatttagtcatactatgaatttaaattataaatatagttgtctagtctaccattactataaatatcttttattgatatgcttgtctatgtctcttttgaacaggtattttgatgttggactgcataatttcttaatcaggtaagccaataatttttattttagataacattgaatagcatgtctattatgaaagattgaaatggaaaatctttgttaagtatcttgataaataatggcacttatatatatacttgtcaagaaaacattgctaacactatggttttttctgtttcccagaatcacacgattaaacaattaaagaaatcaatgtttaaagaggcttatttctgaagtgatagttacctaagatcttgacaagtataattccaactactaggctgctgggaaaactaattgaaaaattaggagtgccagcttgtattcagacgttaaacaacccccttaaccaattttccctccactgaatttaatctttttaagtggaatcttccagttgctttatagttgtgaagatacaaccttgttcataattgaaagagattacagatggcagtttatatcctagtttattaatgatttttaccagagttggcttatgggacatattaatttcaaatagctgttaaatgtaacagaggttaaatggaaatagaccagcatattaatcatagttttaagaatatgcatattttgtctgctatcaactttgctgtgttttctaaatgtattaatattgagcatgtattactctaatactggtaaataatgatcgttaaaatgcttgtcagaaatattgagggaagcagaaatggttgccgaaagactgcaagctaaagatgacaaggaaaccagaaattatgtagagcgatttgctttctgcaggtatgcatctctaaatgctagttaattctgactaatagcctgataatgaacagtctgtagactccatgtgatttttgggtaagtgttatggtggttctgttctgtacaatgcatggccatctccctattggtaagatgctctttgagaggaagtgtacataattgacatcacctttatccccaccaaaaaccacatttcctccacactggatatggtgatgttccgagtgaggccatgcataccttgtcctctttgacctcttttccaaggctcatccaagtctgcacaatgaaatctcctcggcctcccccatactcaaggaataaggatggtcctggctttctccaggatccagacacagatagtagtgtgtgaactgctatcttcgacacagcaaggataaatacattttagcaggagggacaaagaaccagcagtcatgggaaagcaggcatgaacattccatatttgaactgatcagaagaatctgtctggatgtattaatacttcagggagtagttcgagttttttatttaatgtctttggtgctttgtacaactcccattgtactgttcccttaatgccttgtagtggatgcaagtttgtactcttcttattttttctagtaaatttattgaggtcagcgatcatgtcttagtcacctatcaatgattagattcagaaacttgtataggatcaaccttcaacaaacattagggctaggagggaatgaatgagatgagacagaaaggacaaggggggtgaggcaggttgagaaaaagctgtacagtcatttattcagcaaataacttaagcctaccatgtccacttacttggatatgtctgggaatgctgtcacttgcaaaaacagacatttgatttgaagctttccatgtgtttatcccttgccaggcctgtagttagagagagcagtggtctgcctttgcgatccctcttctctttccttctgggctccaaccattcctcctatgttgggtctggaggaaggagaggcagtggtcaagtgtctctaatgtgactgagactggtatccccttgctctggcaggaggcccttttgggcaggtgctggaagatgctctaactggtcaccttaaccagtgttctgtgaagcaagcagaactgggagggtaaggcttctctctaccttgctgtgctgtattctgtgtttcctttccctcattcaggtagggggcagagtaaatcagcaggtttattgcttatccaactggggaatgagaagtcagttttgcaggcatccctagcctctgggagtagatctcttcctctcccatcacatgacagtgcgccccaacaagcaaacaacttaatgactccaaggagtcccttcatctttcctcttcccagcttgggagtaaggggtaggggtgttaaagatggtggctgggagcagagtcagttctccatctcacagtaatcccagaatggggtggatctcacctctttatttgtagctctcttcagaaagtgagtattttcaggccaggcacggtggctcacgcctgtaatcccagcactttgggaggctgaggcaggtggatcatgaggtcaggagatcgagaccatcctggctaacacggtgaaaccctgtctctactaaaaatacaaaaaaattagccgggcatggtggcgggctcctgtagtcccagctactcgggaggctgaggcaggagaatggcatgaacctgggaggcagagcttgcagtgagctgagattgcgccactgcactccagcctgggcgatacagcgagactccgtctcaaaaaaaaaaaaaaaaaaaagtattttcagccaggtgcagtggctcatgcctgtaatcccagcactttgggaggccaaggcaggcagatcacttgaagccaggaattcaaggccagcctgggcaatatgaaaaaaaatagtgcctctactaaaaatacaaaaattagccaggcgtggtgacacacacctgtaatcacagctacttgggtggatgaggcatgaggatcacttgaacccagaaggccaaagctgcagtgagccgagatggggccactatactccagcctgggtgacagagtaagactctgtctcaaaagaaaaagaaaaaaaaaaggtattttctgcccccagcttgggagggaagtcaaacctgatgggacccagcaccatttatgactggacaccttagtaagaactgtttcactgggacagtgaccctgaggctaggttgaagacggtggggttagcagtgagggaatggcagcagcagctcctttaagaagataagctgtgaaggggaagaaagaaagacagggcagctggtggagagggcgggtggagtggatatttttttctttttaatgggatgaactcttgtatttagccaccagaaggtcttaagtgtcctttagacttagagaaagcagtttcatttaggtggagagaagtagagcctgattcctagggggagtgagtggtcccttagtaacctcagacagcaatggcattttcttgtaaatatgtcattagagaaaaccttagagggttggaagagtgagagggatggtacttaaggaatccttctcactctataatggacaagagaagaaaatatacttccctttgtaaaagagcaaatgtgggagaaattgtcatacgttccccacaccccctcaagattaactacatttattagctccaacaagctcttaatgtgcagtttggtttgtcaggctgtattgaatgcttagtgtttggcataaaaaaaaaaaagctgcagcatgccctgaaattaatcagctgcatcttttaaattgatggaagtcatgtcgacttctctggaatgacgtaaatttccacaaagccaagagccctatctttgatctcagactaggcatttgcaaggagggacatgcttccttttaagccttggagtgctccactgagccatgggggcaggaaagagctgtcacatttaatgaaatgtgggcactgttgatattagtgttttgtgatgactgtgggaaaattcagtgagcccagtcctgcatcttatagaaatcatagacagaagcagcaatcacaactcacctagggatggcctcagaagaagcctactggctggagttcttaaatgtgacaccgcacaagaaaaggtgaccaacctggggaaagagattacagaataaaaatctctgtttcattatagataacagggtggcttgtttaaatttagcttagtttagctttggcaagaaagtaagtgattttggtttgattcttgctgactgaggcatttttcttttatttttctttcttcttttatctttgaatagatatggggttttgccatgtttcccagactggtcttgaactcatgagctcaagcgatcctcccgcagtgctgggattacaggtgtgagctactgcacctggccagcacttttcatcttactcagaattgtagccagcactgtctcttttaagacaaaggtgtacatgtggtctcacttatatgtggaatttaaaaaaattgaactcatggaaacagtagaatggtagctaccaaggtctgggagtagggactgaagaaatgtcaaggaatacacaatttcagttagagaggagaaggaagttcaagagctctattgtatcatagggtgacaatagctaataatgatgttttcttgaaaattgctaagacaggagattttaggctttctcaccacaaaaaagataaatataggaagaaatgcatgtgttaattagcttgatttaaccatttcacaatgtaaaagtatttcaaaacatgttgtacaccataaatatatacaatttttgtcagttaaaaaataatattttaaaaacgatgaatgatacttgttttgttgcctcccccacctctgactgctcctatctgacctcctcaggtggggcagtagttttcagcaggataacatcatgagcaggataacatcatgactttaaaaaaaattgacacactgtatttatatttatggggtacaatttgacgttttgatgtatctatgttgtataatgatcaaatcaggttagttagcatattggtcatctcatacatttattatttgtggtgagaacatccaaaagcctctcttctaactatttggtaatatacaataccttactgttaaccattgtcactctactgtgcaatcggacaccagaacttactcttcctatctaattgaaactttgtacccctttgccagcctctccctatcctcccctctctaccccctctatggtaaccactgttttattctctgttactgtgttatgaatttttttaagcttccacatatcagtgagatcatgtggtatttgtcttagtttgtctggatcttctcagttaacatgacgtcctccagatcaatccatgttgtcacaaataacaggatttcattcttttttatggctgcatagtattccattgagttgccaaaatcaaataaaatatagagatgaatctctaaatttaaaacattttatttggccccaggcacggtggctcgcacctgtaatcccagcactttgggaggctgaatcgggtagatcacttgaggccaggagtttgagaccagcctggccaacatggcaaaatcccatctctactgaaaatacaaatattagccgggtatggtagtgcacgcctataatcctagctacttgggaggctgaggcatgagaatcttttgaacctgggaggcggaggttgcagtgagctgagatcatactactgcactccagccctgggtgacagagcaagacaccgtctcaaaaacaaacatttgggaagcaagaagtttcaattcagggcatacatacagaccaggtggtcttccgtatgtccagagaacaaatagaaagttgggagttttattagaaagagaaatgttatgtattgttttgaaagaaagctcattggcactagagaggcttttgagagatggtaagctctgattggtgactgatgatggtaaataaaaccagtgttagagtcttgggaggtcatttcagcagctactaggtaaaactggtcttagggttacagcagtctgttttagcacctgagcttgtggaacatttaactcttggagcaggtgctatgtgtccctagtgcttttcttccttggcccctcaactctgatttagttgggtatgacaagagtgacccaatttgtataattaactttcacagtgtgtatatgccacattttctctatctgtgcatctgttgttggacacttgagttgattccatctcttggctattgtcaatagtgctgcagtaaacatgggagtgcagatatttcttcaatatactgatgttctttcctctggacatatacccagtagtgggattgcaggatcatacagtagtttggttcttaattttttgaggaacctccaaactgttttccaaagtggctgtactaatttacattgtcaccaacagtgtgcaatgtaaagagttcctttatctgcacatccttgccaacaattttctttgcttttttttttttttttttgaggcagggtctccctctgtcacccaggctggagtgcagtggcgtgatcatggctcactgcagcctcaacctcctggactcaagcaatccgcctaccttagcctccaggtagctggggctacaggcatataccaccatgcccagcaattttttttgttttttggtagagacaaggtcctactgtgttgtccaggctgcttttgaactcctgagctcaagcgattctcctgccttggcctcccaaagtgatggggttaaaggtgtgagccaccacacttggcttttttttttttttttgtctttttggtaatagctattccaactggggtggggtggtatctcattgtggttttgatttgcatttccatgatgatgggtgatgttgagtatcttttcatatacctgttggccatttgtatatcttcctttgagaaatgtctattaaagtcttcagctcattttaaaaccctttgtttttttgtttttttgagacggagtctcactctatcacccagactggagtgcaatggcgtgatctcagctcactgtaacctctgcctcctggattcaagtgattctcctgcctcagcctcctgagtagctgggattacaggcacccaccaccatgccctgctaattttttgtatttttagtagagacagggtttcactgtgttggccaggctggtctcgaactcctgacctcgtgatccacccacctcagcctcccaaagtgctgggattataggcatgagccactgcgcctgacccattctgtcttttaattggggaatttaatccatttacattcaggattactattgataagtaaggacttactcctgccattttgttaattgtttttcagtggttttgtagattttttttccttttttcctctcactttttttcgctctggtttggtggttttctgtgttgccaagctttgtttgttttttatctttctcatttgtgtatctgctgtaatttctttgtggttactatgggactaacaaagagtgctgtagttataatagaatttttaaagctgataacaacttaactttgggcatatgacttttaaaggagtacctgataccatcctcctcccagtgtctctgaaacattaaatttgtcaatttataatttttattgctctttaggttacagatttaaaatcagaaaagtattcacctgaattttgttttctatattatttatatgtatctcttcaattaatttcaaatacatattttgaataagaatctagcttttaaaaaaatagcaagataaattttctttatcgtcacttttcgtatttactccagagaccatgtgtgagttcatcagagccactacttttgtcctaaggagaatgtcttgatatcctctcaggactagtggaaatgcaaagtatggaaatcattccactgatacttcttaggcaaatagaacaaggcagtgaacctctggcatggccctgaagctatttgagaagatctctggagatcttaatgtagtccttaatatagtccttagaagataatttttttccacaaatagattttgcatattagaatggtgttcaatatagcacatattcagttcatacaaatgccaacatttatatgaaatagtgtgtgcccttttgaagcatgattttgttctgatgagagagaaggtagaacatgacagctgttcactgcttgtagtgtcttttattctcctggaggttggtgcaggttttccatgaagtctcaaatatctttgaatggccagaagggcagcaaatttctgcagtatgggagttggtggcttgctgaattctgaaatgattataaatgatattacctgcttttgggttttccttgttgataccctatacctgaccctttcgtaaaattagccctacagcagaacagaattattatttgggctaaaaatcattggcattttgagttttgtgaatgacagggtaatttttagctttctttatattggataccacaagtctatcaccacatttgctgtagttaattgtaacattcctggtattgatgaagaagtctgctcaccatcatttgaagtgtttcttggatggtgtggtgtctgaaatgttcaaaaaatctgccttgcctctttaagaagcaaggtggtcaaatgaaggattaattgaggcttacccactccctctgagaaggaagagagctggagatgagccactctttttttggtgtccccttaggaccgtttagacctttttgggctctgagctgcactggaaacagaagttaaggagagaggtgcacatttgatcctggaagtaagacccagatggtaatgggaagttaattagcatctgtattcagtcttgcagtttagaaccagctaaaacacatgcatgttctctgtccaccaggaaagaaagatgaagccattatggatgtatttttaaacacagaggtgataactcagaggcaaaaatacttgctttgttatgtaggattttaaactttgtattttgtaagtgtaacataaaggttgatttctgtttaaacagtttttaatagtgatataaaaagtgaatgaccttattaaaacactgcttccacctgaggtgagtctaaagtgtgtgtctttgtggccctaattaggcattgtcgatcatcttttagtggcatccagaggtgagaaatgacacctgggaggagtccccaggtatcttttatccctgcctgatgaaaactcatctcctttgaagtgactgcagtatcagtttcttttaaacttttctttgattccaccagaaagaagctaaggatctgtgtggtgttcttgtactaaagtgttttaaataaaaagtgaagaacatgtaagtgaagagacccgggtaaccaaaataggccccaaagaggcaattaatgaaaattcaggcagggtgctggagagaagtccactggctcccatggggctgggtccccccttccatcgttgctcctgcacccagtcattttccaaattgcactggctttgtcttcttaacatctctcacatccaccccttcctttctgtttctggaggaaaagaataagacgcaccgttgtctgtgaactgggcttcttatctcacagagctgtgatgaagtttaatagtatatgctaatcactcagccctgtgcctggaaatgatggaaactcaaggctagttttatctccttgccccccaccccccaatcccactatacctctggaatcagagtaacaggattcgaatcctggcacgctctctttctacccataactttagataactcatgaaacctttctaagaccttgactacttatctgtaaattggaaatcacaatttctggctcaagaaattgcttgccaggcttgaatgggatgaagtgtgtcaaaagtgttttaggggccataacactccatgcagatgttagttattactctggtcgtcattttctttccgaccaggttgtccgagcctcttcccagtcccctcacctttcatggcttttctttgactttgcttatggccatccatcagtctcacagaaacccagccctgatgcttcccctccctcctcagaaccagactttatacaaccccgtgtcctgggcccaccacagtgggtcttcaggctacctttccatctcatctcaccattattccccttgtgccactgccacttgggaccaaatgctgttttttgcccctacctcaccatctcctagcatctttgttccctataccagaagtgcctgagcttctcccattagtgcatatccaaatcccacccatctcagtccatctcagatgctgccttctctgtgcagccttcctctctctacctcgataacactgcctcccaagcctcctggatcctgggaatcttcctggatgctttagatccccaagctctacttctggggattgggctaagtggatttgggtagagtccaggaatcagtataattgtgaatcactcccagtgactctgatgctcaggggactttgggacccctgctttaaatatagcttgtgtgtgtgtgtgcgcgtgcgcacacgtgcgcatgtgtgttgcagccccctcccaggtagtgagcagggtctgactcatctggatcttctgcgtagtaccccacaacgtctaatgtctagagggctcctaaacatgtttagataaactttattttcaaaaatgtaaaaggacttagtaaccgtctaattttcttttcatttaacccatttatttttataccaaattaagtgccctaagtactattctaggtgccaggatcaaagcagtaacaagatagacaatgtccctgccctctcttagctcacatcccagtgagtaaatgagaaaacaagtaagcagtgtgtgatgacatgcgtgagcatggaggacattagctaaatgaaatcagatgctcacagaagaacgagaactgcatgaatccacttttatgaggtatctaaaataaactcatggaagcaaaaacaaaaatggaatgatggttgccagggggtgggggaagggagagttgttaatcgggtataaagtttcaggtaggcaagatgcataagctctggagatccactgtacagcgtgtgcctgtagttatcagtactgtatggtgtacttaaaaacctgttaacaggttagatctcacattaagtgtttctacaataaaatttttttaaatggaagaacaaaaagaacccaagtaagcaagcactgtcattcccttgatgtgatggagggtgcaggtgtgagtgccgtgtttgaagggctgggcaggaaggccctttttaaggcagcgggcaacacagagatgagtgaggaggaaggagtcaccagggaaagggcgagggctggactgttcaagccagagggaagtgcaagcccccgcccctgagttgcaaaggaacatgcttgaggaacagaaggggagcctggggctggccagtagaggagcaaggagtccctccctgaggctggaggaagagggaacagccagactgtgatgaagattgggctccattttgaatgtgataggagcacttgaagggttttaagtaggggagtgacaggatctgatttacattttcaaaagacactctgacagacttaggtgggaatctagagaaattgggatttttgaacctcaaccatgactgtgcttctgcaccatgaactggagcctgcaggtccaggtctgtcctgctactcgggggtttctcaaacagacagctgttgtaaaagcttctctgtgttgagcaacaatagacctaaaatacctcttaatttctttctgcttgcctggtgtgttctaaaatatgtaattatgcatgtgaacattaacttggaggcagttaagtgagggtgggttgtggcagtaggctctctccagaagcatgggcagctgagtggagttggggtcagggctaggaaatgtacttgggatagaggtttgcagttttcccagggtgacaagtacccatcttgtcttctggccactcagcaaaccagggctttggctccttcactggttcatctctcttgcttggccattagttagtgaggtctctgaaggcctagttcttagccctcagcacccttgcgttgatgcccattccccttggatgtcagcccctcttaggacacagagaccctctaaatccacaaggctggctcattctctggggctgccagtgaaatctgtcacataatgtgttggtgagtcctcccatttcttgtcaaaaattaaatccccttccaggctttccccatcacagtcatgtcaatgtccgagacaacattcctcatcctccagatgcaaacacttggggtgctttggagtcctttgcttatgttcacagaatgttagaatggaagggccttgacgattatgttccacatttcactaatatttcatttttagaagatttctcagattcactcctcaccctgatcttgctgttaccacttttgaggaaaaacttgttagaattatttgtcttcctagctgtgctatatttgaatttattaatgagacaatccagatttaaaaagaaaaaactaagagaaactctcaatacttgagaattgagatgcataatttagttcccaccatatatagctttatcaatacagatgttcctgtgaataaatgtatcttttaaaaaaaattaaaaagagcccctggtgacttactcaggatatttgcaatgtagagacatagttttaaatgtaaaaagctctgagtcagcgatgttgcttagaaagatgggctgtgagatccatggtcttaggccactgcagatgggttatttacttgacaggccatttgttaagtgttgtcgctgccttcttttgaattcttttcctaatgcgtgcgcgatctttctgccttatgcggttgctgcatctggtagaagccataaatgtttttttcttccttgcaggaagagtctcagatccctcgtgcctgagattagattccaaagaaaatgggaggtgggaagaggtgggacctggaatgcattctggtgagcgtggtagtggtgacaccgagcttggaggggcagaggttctggggtggagtcctacgcgcagcactggagacggggagcccctttccctgagtccagtggcagacatggttgagtccccactggagcagtggtggtgtaatttgtcaacagttcctgactgcaacacctctgagcctggctctcaggccctgtcagagattgtgcaaactgcctaaccttccttaataaactaaccagagtgggttctgtttttttttttgccactgagataactaatatacttacctgatggacattggagatacctagctcaacagggggagcgcatgatctttagttagctttgcctatgagctgcgtcagttccacaaaccagaattaaacaaaattagagctatttttgcatcagtaacagaagcagcctgtggaatggaaaaggcattggatcagatgcagaagaccaacactctagactgccgtacctctcttgctgcagtggttttgtgtgagtcgcttctgtttgggccttagttttcttatttgtgagatgagagaattataccagataaactctaaggtctcttccaatctcaacagcctctgctaagcagccttgctgtttctaatattagagagcagcttctgttgtctagatatgtgccagccaatacagtagctattaatcactcatggctatttaaatttaaactactgaaattccataaaactactgtgatgtgatataatatgaaatatatatttggtctctgcctcccagtttccagcacagagctcctaaaacacttagatggggacactaggataatattttgtcctgatacttgatctttgaccccagttcctgatgcagagttcttaaatccctcggaatttcctgagtgatcagaggatcttttgttctaatgagacaactcttggtgggcttttggatagcatcagggtgggggctgggtgccagggtaaccaaccatttgataagaggattggaacttttagccccacccttatcaccaccttccaagaatgaagaggctccttcattctcttctttcctttagtgcatgtgtctaggctggctcagcacccagctcagactcccctggaagcgtcaggtgctcccttgcagcatgctgtgtggtctctcgtggtttttcagctcaggctcccatggctgattgcctgggtttgtgtgctggatgcattactcttgaccatgtgaccagcttaacagcttcatgcttcactttccttatctgtaaaatgaagattaatagtaatacctatttcacaggaggttttcgaggaccaaataacatagtacacttacagtgcttaggatagtgctcagcagtaatacaatggctgttagccatcaccattatcagcatcataaatttcctggctatcttgtcattctttgggatcttagcagactgagtggcaacacctttaaaaaaataaataaataagggaaatgagtgattctgcttttgcttaaggtttggcgattcacaagctccctgagggccagaatcgtggggcttgctttctactgcaatttcctttgagcacgtgacagaggatggtgcgccaacagggtggccctaatgagtggagttgccataggccaaacccaggccatctctagtgtgtactagccatgtgactttattagcaaatatttaatagcactgcttcagtttccccatctgtgaaatggagacattgtcacctttgagagaaaagtcagatactttgaaactctgagttatgtcaagcaaataaataaacaaatgggtgaagtcaatcactctaaacgcatgaacccattcatttgtacatcagatgatttttagcatctaccatgggcaagaaaccctacttgttcttggaacacagcagtgagcaaaaagacatgcaattcctaccgtctgggagcttattatgctttaggagcagagaggtgttcatcaggtgatcatatgcatatctgcctaagtataacaaccagtaatgccgagagagagagacacatggtcctacaagtgtgtgtcacaatgcaccagacccaggggtggtgcaggggctggtcatggggaaggttctcccaagatctttggggtggaaggtggagggaaaagcatatcaaacccctgtggtagaaggagcagggtgcatcataggaggaaaaagagaaagaaggttcttgtgttccgggcgctaagagtgatgggcacagtgaggctggtagattgtccatggctgggccatgtaaggccttgaatgccattttaaagatcaaagtcagttttaggtgctaagcaatagcctggaaatgaatgactaaggagtttcctggggaaatgtaacagtagctaaaaattatgtatacaaatgtatcctagcatgtctaaagttctcattcagatgatgtaattaacatattgaagggagaaactttcactagcaaatgcatagtatagcctattaattaatatgctaaagtggaaggatctgttgtgaggaatattatcactaatctgttaccaatcataataccaatgtttgcaatgatgtacatttttatattaattagggtagatttgtttgcattcagataccctttcctgaaagagaaaaatgtgatagtaccatcagggatctggaaatcgggcataccctgccgtctgtagaaatctgtgatgcacctatgtcctggtttatcagcaagtcaaaatccccacgtgctcatacgaattattaccccctgggataccatccattgataagtgcagccttggaaccttggggatagtttcaaatgttgatcaacatataagatcaaattttgttagaaaatgggtgccgggtgtggtggctaaggctgggcgtggtggctcacgctggtaatcccagcacttcgggaggccaaggcaggcagatcacctgaggtcaggagttcgagaccagcctagccaagatagtgaaaccccatttctactgaaaaaacaaaaattagccaggtatggtggcacacgcctgtaatcccagctacttgggaggttgaggcacgagaattgcttgaatccaggaggtagaggttgcagtgagcagagattctgccactgcactccagcctgggcaacagaacgagacttcatctcaaaaaaaacaaaggaaaaaaaaaaaaaaagaaaacggggatatttgttgttaagctgatgtacatcagacagaacactgaattaagcaagctatgagaagcggggatatcaacgtggtactgagagatcagtgtttattgtgacttgtgtaaaatttaatccctactctagctatgtggtaccttttgaacattcttctggcttttagggaatttctagccttacgtactctgcctcctcaaagtacaagtcaaaaagtcactctctgggcctcccttgcagctactaccccagtgtatcccaggcccagcttctcagggacatcaaaggggtaactgggattcagaagagcatcgtgggaatgacagggcctcccacagaactgtttccagcaaggatggcagagagacatgcagctttccctgcagcataaacagggttctgcaccacaggcgtctgctgtacatgccacagtgctgccagcggtgtcaccagaagcggagtgaactggaggggcctcagggagcaatggtctcccagcctgatttgctggcccactcaggtattctgtgagtacatgtcctttaataaattccttttctgcttagttagagtctgttgtttgcaactaaaaactaagttatgtatcagactgtataaataagcatggtaaaggcagtaattcattctgttctcacagcgactcggtgttgaagagggaccacgtgagtcttgaggtaactggataaagtttaatcctttggttgtgctgccagttcaaatgtttctgctatgatgcagggtatacaaacttggaaaagctcaggttatgtaaaattgcacacaaaaatcataggatttatgggaaaaatagagttgagtaaatcactcaaaacctatgcaactttgtccagagcaccaagaaaaacagtaaccgtcccaataaggatcttagcacatttgaaatgtcatgttgaattcctaggaaatacatattctagtaaatacatatcagcctttaccttaaaaggtgagggtaacatgagtaaaggggtataaacaagggttggggctgtcagggctcatttgctatgaatcataatattaataccaatgtttgcaataatgtgcatatttgcattaattagaggagattcatttgcattcaaataccctttcctgaatgagaaaaatgggtgacagtacaggcagggacttggaaatcaggcataacctgcagcctgtgggaatgaggagtactgaataaggagttattaacggagcaacgtgttctggagacaaaggccgggagagatggagaaaagcatttgcagactttgcacggacttgagtgatgtctgagatagatggctctggatccttgttctgggttgttcttttacacaagagcctaggagaactgggtgggccctatgtgcttctaagacagcatgttgaccgaactaagccaataggaaaaagaggcaggattaatgggtatctggtacaataatctagtcaattcttttagtgaattctctgttcagatgctcaaagtattgacaggctaagaaaaaaaaaatgcatataaacagtcacaatttctgttttataaggatattattttcctgtttaccaattagtcatatcaattaacaacaaggatacattctgagaaatgcattgttaggcaatttcatcattgtgcaacatcgtagagtgtacttccacatacctatatggtatagcctactgcacacataggctttatggtggagcctcttgctcctagactacaaacctgtgtactgtgttactgtactgaatactacaggcagttgtaatatgatgtaggtactcatctatctaaacatagaagaggtacagtaaaaatacagtattataatcttatgagaccactatcatatatgcagtctgttgttgactgaatcattatgtaatgcatgactgtacatatgaactatggtaattaaagtgtgagtgtgtgttatagaacagtctgtatttgaaagtgctgtgtaaacctgaaaagctggtggacctctggcctgtaaataaagggactgtgggtttcagatagtctctaacattgttgaagaggacgaggaagaagaggaacccaggcagaggactggaatctcttgtcaatacaggctgcagagaggtggaatagcttaacagttagaagtgtaagttgtggaattaaaccacctgggtttgaatccctactctactgcatactaagtctgagcctcggttttttcatttgtaagttggaaatgataaatttgctaatgtatgtaaaatacttaggacagttccctaagttgttatctcttatctgtccatcagtccacaataccatctgtttcaaggctaaggagagaaaacccatatgaaaatgcctctcacagggtctaaaacttagtaggcactcagtacatatttgtggaatttgaatctgataagaaatatcgacataactgtaactaacagtgtttcttttcctgtcaccaagtctatgtgaaaaggcttgcttagtggcaagggtgggataatcttttttgacaagacagatagaagagcattttctacaccaacaggtgatgattcctgggtacttgcaagcaacatgtgatcccagggggaaggtccgaccttcaaaatgtatgtggactagaaagaaagagcagcctggtttcagctgtgaaaaggccatttaaaataaaaacactttagaagctgaaagcccatagcatctgtttctaattgaaaggttatttgcagacaatgtgtttttcatagagtgacatttatatgtgtttattaatatactgagtctattacagtgaaatccattttggaaatggaaatagatttttgaacattttaatcaatttttaagcaaaataatgaactggaaaacatttagctgagaaagtgcatctgattacacaggccaatttttcagttgtaataaaatgcagatatgtattgtttctccctgtgctactgagaggaggttccttattttatctctggactcgataacatttttcactttcatctgatgcttcagaggcccaagattccagtcctggcttttccatttatttcatggccttaggaaagtcacttcccatttctggacatcagctactcattggtaaaaacaccttatgatttaaaaggtctcttctagccctaaacttatataactgtagaattctgtgacttgactaaagcaggcaaattcctataagcaactgagcaatccaagaaccatgacattctccagaccccatattggagttttagatactggattttatgtttccgtcggcaccatgtgcagagctcctaccatatgcaggatactcttaaggccagtgatgagatagaaaggtaagcaactacctgagttttctgtggtcttgttggagagggaaaacaaacatttatgacataattagaatgattaaaccagttagaaatgccagagcacaaacctttgataattgtagaatacgaaaggaagaaagagtcctagggggcaatgtggagaaagggacacattcttaaggacaatatttataatggaaaaatgaggcttgggttcatattctatttactgagccaaatctgcactacctattttctttccatgtaggttttctggaatataccctagttgagtcttgctctctcactagatttgtgagcatcttggaagcctctccttgtttttcggtgtgaaatccctgtggcatctagcatggcactttgttcaatataaatgtcttgaatggtggaacacccctgatcctcaccttccagccctatcattgctcactggcacctgaatttggatatggccaggagtgataagtgggtgagatggaggtgaatggcacagaaaagctggctcgtttgttggtagctctgctgttttagaagtacagatggcagctggctgcttcagaagacagcatctttggggactgtcaactccaagggaaatggggctcgtttgttggtagctctgctgttttagaagtacagatggcagctggctgcttcagaagacagcatctttggggactgtcaactccaagggaaatgggtatgcctgagaaagctgcatccccagatgctgctcttgggcttatgtctggagatggtcttttcatgactaaatatgtttgtaatcacctctgagactcacagacaacctgcagctttctgtctgtaagagcttctccatcctatccttgatgcatcttgctggaacaggcaggagagtggcagcatttgtatatggtgcacccacaggtgtattttcagagggaaaaaatcaagctatgtcatcattgctttaaattggggatctttaaatgggttctgtagtcctgccaaggaagctactggttaaactgagatttagggatttccaatgattttgatcttcctggctttctctctaataaagaaatcaaagattgataatttagtcttacaaacttttaaaagtttctgagaaatcaatcctgactccaagaacaaaaaaggcccggcttgaatgagtttgtgctggcacctggcggcttggtgatgcagaatactcacgggtccccaaactcactgtggaagatggcgttaggcaggaggctggaagagaacatggatggggagccagtgggggaaatgaggagtctcaggctactgtatagagtggaaggacatctttccatactggctagctgccatgcactggggtaattgtaccttcccgccccccaccgccccaccaagtgttctcctaggtgctgttctgggcactgctgagcaggcacctatggtctgtgaggggcatccattcttttcctggctctgatggctcacgtggagcctgtcgagttttcttttcaaacttgatactgtgtcactgcactgctaccatggtggatttgtacactcctgttatatttaactttggctacctgaggatgtgggagatgattattcacactacacggtgtaaagatttatacatatttttttccatagggttttgttacattttgtttatttcattaatgcttttttttatataacaatcccacccacgtcctgtacatgtacagaaatacaggtggagtaccccttatctgaaatgcttgggactagaagtgttgaattttaatttttttcagaatttggaatatttgcatatacataatgagatgtctaggggatggtactgaagtctaaacatgaaattcatttatgtttaatgtataccttatatacatagcctgaaggtaattttataccatattttaaataattttgtgcatgaaacagtgttgactgcatttggacagtggcctgacacatgagaccacatgtggcattttctacttgtggcatcatcacagagctcaaacgtttcaaattttagagttttgaattgtggattttctgtaatagaattcccagagaaaggtcaaatatatagggtctagatttacccatcacattagtgctaagatacctatagaattgtacctcctgtgtctaactttctggccttcaacaaggaccttctggattgggttgatctctctttgccttcaatgggagtactgctagcaggatgcactgctgaagtcactccttgttagagggttggctttgcatccacattttcttaaccaggcttcctgaccagcctctgctttttgtagaattgtttagctatgttgagcaccagggaggagcacagaggcctctctggggcaaagacaatgaatcccagccctgaggaaggccactgttatgcatggagctctgggttataggacctccattgccagcactacttcaacctggccatgtgaacatgcccatatcaggctccagttcctcatttgccaaatagaagacagtgactacgtaacagggttttgtgtagattgggttagatgatttatgtggaagaacttggtggtactgtacagtattgtaaggttgattactagcctgttgctctaacctaatgagttgtaatactgtgggggaaggggactgggaaacattgtgtgtttgtgtgtgtgtgtgtgtgtgtgtggggtaaaataatataaataatctgtctttcatagttgatgattctctggacattggctagaatccctttggatgggggagaaagatcagtaggagggggtagaccagtccgcttggtgtgcaaacagctctgttcacacatcagatgtcagattggcttggccttttatgacagaagctactttgagcgacactcttgctggtgtgtgtttgtgtgtgtgtgcatgcgtgcatgcatgcgtgcatcccttcttgtgctgtatctgcatagaaaatatagcaaaggttttgattgaaaatttggaggtggggaagactctgtgaatagcacatcaacaaataaacacacccatgaaataaacagtgttccaaaccaaacccactacaacacaaacatgcaaatatgctaaaagctgtgtaaccaatagcatggcccctttagctctgaattacagagcctggaagagcagcttgcggatgctcaagattccagtaattattcaactagcagccagctccataactctcagctgctcctggggagattagggcatatgcatatcgagtccagctccgagctgtcactggccattagagtgctaatgaccaactgatttggctgcctcaatgtggtggaattccttttgaaagtattttctttttaattggggaaaatacgtttagagctttagtaagtacctcatcactgaagccactgccgtaaaatatataaatagcctatgtgaaagttctgggacatttgtatgaatttagcccattctagcacacagaattttaccatccttcatccacctaacctggagtctctgatgcctgttgttccctgagggctcatagctactgctggtattttgagaatgagtttcagagcatcttttcagtactgaactttctttgtctgaacagaatgcagccagttccctacagtttcctgctggggaacccagctgtctgctgttttcatgtgtgtccagcccaggcatgctgggctcagcaccacattactgcttgtggactgaagactttacagcctctgcctgttagtgattgtatctctcctctgctgtatcatttacagtggaggtggaagaacaatatgggagaatctgtcttttcttgagttggagaaggatttatgtctcctaatcagcagaaagttaatgtaactggggcattcagataatgaatagggtgctaatacaggtgatcaggggcagtagcaaagacacccctcagataattcccccatggggcttctgtttgagttggacctttgccatacagcaggatttggcgatgttggcactgttgacattttggactcgttaattctttgttgtgggagctctcctgtgtacttagatgtttaacagcgtctcgggcctctgtctgctaaatgtcagtagcatcccccagaaatgacaataaaaaatatcaccagatagtgccaactagccctggggtgtggagagagaggggaattgcacttggttgaaaccactgttaaagataaaatgtcatgtcgggttttgaactgtacctaaaagaaggtgtaaaaaaaaaaaggtggctatagggcttcaagtttgaaataatgtctattgcctctgatacatcctcacccaactgccactgtaatgtaatgtctagaaaacactgagaaaagatgaacaaaataaacactgaaaagtagggctggacttcagtctgttgtcagaatcaatgagaaatttctcttactttggcacagaaagctcacttgtctgaaaatgctgtcagtggcttgtgcatgctgtgctacgaagtccctcacccttcttctgctgtctgcccgtcccaccagttcagaaacatagtctgttgcaagcagaaaggtgggctgcccttccttgtacaaatacagtgtcattgttgcattccgtcccagcgcaattattgtatccctcttctcacttcatagacacccccctttccacaccaatgtggagactccaataataataaaatgagtagacaggaagtggggaacaccggattgggccattggggttcatttctgtgttccgtcttccgtcttctgcaggtcagctgcagtaggtgaaaatggagacaggaagggccctgctgacacattgggaagggccattttaatgtgtcatgttggttaattgatcagacaagcaacgaatgggatagaggaaaatgtaccctgaaggaagaagcaggatatcagagaatacctgttggaaacttgaagttggactaggactggcatctcgttttgttctttgagtgtgttgcttgaggagatttgattgttgtttaaggagaaacagaacaaagtgaaaagcaataaactgtttcctttacccttttcaattgaaagaagaacagtttgagaaactcgagtcatttgaagttctcctttattaattttatagagaattttatgattctgggttttattgttgttattggtaattggatgatataaaaatttttcagtgattttgtcttcttgctaattagaaatagtgatgaaagtatctttttgtattacaaggcttttttttcctttaaacaattgtacacattttgtattttttttttttgcttttctccatacagacctttatgagaatggattcattgtatcccgtaatttgctattatagtatgtaatgaaaatgagatattcatcattgaaaatcacagcaaaaggcaatgtattcctcattgatagatagcagttgttgataaatgctaaatatgaatacattttacttcatctaaggatttatgtagagaaaataaataatatttagccactgaagaaagtttccactgtaatgtaagggactcatcactccaagtctcagaggaaaagcaggcctgtgagatgatttattataaatataaaaaacaggaaaaatattttaaaactttagtctcatgtggcatatatgaaataagagtaataagccttaaatagaggataagaagggaagaaaaatggagttaagggaaataaagcatttctggaaaaacaaggatgcaatcacataattaaagttctctttggagaacatgaagatcaaaagtgacacttgaaaatactcctatgaggaagacagtcttgagattgtcttctacattgtagaaaaggagatacaaatattgagagaaaataataaatactagagataactgtaaaacctgaacaatgagagcagaagcattaaaaaggccaacataaagaagaagctgtcctggatttaaaaggactaaccatattacaagcaaaatacatagtagaaggggctgggcacagtggctaatgcctgtaatcccagcactttgggaggccgaggcaggtgaatcacctgagatcaggagtttgagaccagcctggccaacatggtgaaaccccgtctctaccaaaaatacaaaaattagccgagtgaggtggtggacttctgtaatcccaactattcaggaggctgaggcaggagaattgcttgaacctgggaggcagaggctatagtgagccaagattgcaccactgtactccagcctgcgtgacagaggaggaccctgtctggaaaaaagaaaatcacagaaagagagccatgtggaggcacattctgctgtaatttttgaattatggaacaaaagaaaaaggtacacaaggatccacacaagagacaagggttacttaggaagagaaaaaaggtgtaggacatctgcctggcaatacctcaggccaaaaaaacagtggaacaaggcctattgagtactgagagggaaagactatgattcaagaattttatatccagttaaattgttttagtgtttgaagccaactgaacgacttctctaaaaatgctttagggtgcctgccctggacaagccctcttctcacagaatagtcttgacctggaaggacctatggagtaggaaggcctttgagcccaggtggccttgccatctcctgctaaagtggtaggagtaggagtggccatccctcagaagtaacctgcgatttaagatctggtaaacagggatgaggtgggccagctagattcttcttcgaggattttgggatagagaaaatgttgcagttggttttgaggactcgaggtagagagtcacagagatgggggtgttgtcagcggctccccagtctggcaatgtgtaaactgatattgcagagggccagaagctacgaggaggcagggatgctgagtggggtcagagaggagcagagaagccacacacagagacagggcagctgtttcagtgccttttttgtgctcacgaagccctgtcatcctttgaattttgtcctgtgtccttccagtaaatcctcctggatatgagagtgtgtatctgttccttccactcaagaaaagttcttcctacaagggcattctcagatcatcaagggcttatgaagcatgccacctggcagcctttaattgaaaacattgcttgaagtacactaaaaattataaatcaaataataaagaagtgcgaagggattggattgctctgtgggactctcagtaggcttaatacctaatttctgcctaaagtcctgaggagactggtcacccaatagccaccctgatgacttggttactctagtgacatagaagatggccgagggcttggtatttcttttcacaatagcatctggatgaaactaaaaagtaaagaatgttgttagggattgttattctcaatttaggcaataatcctgtaatctgacataaaagatgttccgcaacagcttttctcccaggtagcatttatcatcagaattataattgcagtttaatatagtgacaacaatgtagcaaatatgaacattcatacaatgttgccttgagagaaaactggggaaaaaataccaaaatattatgtggttttctttggtggtagtaaataggagattttttccctcttacacacacacacacacacacacgcacacacatgcacacacacgcacacacacatgcacacacacacaaacacacgctctctctctctctctaactcaccctcatagacatacacatagtgtgtataaaaatatatatatatagaaaacacacactatgtgtatgtttgcttcaatgagtagttattgattttttttttttaagacatgaggtcttgctacattgtccaggttggagtgcagtggctattcacaggtgcaataatagcacacgacagtttagaactcctgggctcaagttatcctcccctgcttaggttcccaagtagctggaactacaggtgtgcctcaccacacccagcttaattttatatttaaataaagtattgctttatttaatttttttttttgagacacagtgtatcgctctgttgcccaggctggagtgcggtggtgcaatctcggctcactgcaacctccgcctcctgggtccaagaaattatcctgcctcagcctcctgagtagctgcgactacaggcgcacgccgccatgcccggctaattttttgtattttagtagagacgaggtttcaccctgttgcccagtctggtcttgaactcctgagctcaggcaatacgcctgcctcggcctctcaaagtgcaaggattacaggtgtgagccactgcgtctagccaagtattgctttttaaatgaaaaaatataagacaatatatttttattttatattaaaaaaatagagacaatactgagcaatgtttctgaatgaaaccacaataatgacttactaagaacatcctgtgcatggagtatcatgtttagccacttgaccagcattgtgtccccaaatcttcctgtgaatccaatagactgtggggttttgccattttctaaatgaggggagacaagctctttgagggtaaaggcttaacaaagtctcacaggcagacataaagcttgactgctctagaaaagaataccagccagctgcggtggctcacgcctgtaatcctagcactttgggaggctgaggcggcagatcacttgaggtcaggagtttgagactagcctggccaacatgatgaaaccccgtctctactaaaaatacaaaaattagctgggtgtggtggcgcgtgcctgtaatcccagctccttaggagggtaaggcaggagaatcacttgaacccgggaggcggaggttgcagtgagctgagattgtgccactgcactacagcctgggtgacagagtgagactccatctcaaaaaacaaacaaaaaacaaaacaacagaaagaaaagaatatctacattcacagggaacttcagaggtttaggtggaatgtcagcatcccccctggtctcctggtctgaatgactcagctgagggcctgggaacgatttgctgtctgcccagtgccccaggccgacaatgtgagtgtggcctctcccttggagaatgtttctgcactggccagggagttcatcagcgtcagcgcttattccagggaatgtctgtgacaagggtctgaatgggggataactggccagttggtggattcatctcctccttccttctgctttctcttttcctctcccttgatgtccctttggctgttttccccatctccaaccctgctttttgaatgacaaaggaaagtgaaattcaaactgtttcaagatgagagacaggaagttgtcactattgacagacgacaacctacgtatccttataggtcttgattactctttctccatctgcctgcctctcccacctctgggcagggaataaataggtaggggtgggaggttggcctccaactgcccaaatttcttgctgtcacctaaactgttacccctggcttaccagggacatggtcatccctctggtgtatttcaaaacacattttgatttctttacaattcagcaaatgccttagtttcttttcctgtttctgtcatagcagtgttaggtttaggaaataagtaaaatttggacagtttttgccgcatcagtgttttagttaaaaaaaatatatatatatgtatatattggttggatgcagtggcttgcccctgtaatcccagcacttcgggaggctgagttgggaggattgcttgaggccaggagttgaagactggcctgggcaatatagtgagactccatctctataaaataaaataaaatattagccaatcatggtggtgtgcacctgtagttccagccactcaggaggctgaggtgggaggatagcttgagcccaggagctcaaggctgtggtgagctaggatcaaccactgcactccagtctggttgacagagtgagaccctgtctctgaaaaaacaaaaataaaataatattgtcttaaatcatattaagtatacgtgttgtatatatattatacatatatggatatatttatgtgtctgtatatattttgattgtttgattgttttacatttgcaaaaggtttaggggctgatctcagagctgtttgccaacagaggtagattaatatggcaccgctgttcacagacaggcatcatggggagaactgcatttgcttcattgtaatgaccacagttaagcaaagcttttgattttctttttctgaagcctttatggaacgttagtcctgccaagaaagcgaaaacacatttagtgagtttgtaatcaggagctgatggaatagcctttaaaaaagcagacatttttaaaaaaagaaattcagctaatttcataaatgtgggttaacagaggcagggaagttaggggaggatataggaagggtaaatttcatcagtaggatggtttggcatgctttctctgaatttttttttcctctaatttttctctgaaaaattaataatgctccagggtgtttttctttttttttttccttctttttctgtgaaaaattaagggaattgttcaaataatctctcttcactctttaaaaactcatgtctggctgagcttggtgacttgcacctgtaatcccagcattctgagaggctgagccaagagaattgcttgaagccagtagtttgagaccaggagttcaagcctgcagtgagctgtgattgtgtcactgcactccagtctgggccatagagtgagaccctgcctcaaccctccccaccccttcaaaagacttcacgtgttttgaattttaatttttccaaatttttctttgaattcatttttggggctctcattgtttcttcataggacccttccaaaggccttcctgctatgctctgtattattgcctacattcttttgcctctaagtccatcctttccatgaactccttaccttaacagagcatggatgagaatctagcaacatcctcagaaaccttggtagctcctctctgcccatagggataaattcatcgaggcctcatatccagtcccagctcacctttccagccctatttttctaccctcactgtctccaccttccacataatctagatagctgaagcagttcttggtcccagaacacactgttgacttttctgttctctgcccttgggttgcaggtggcctgtgagctgtctgtaagatccaagatctgtctgtttcggggtctttggccctctcaaacactagaccctaagaaaagactctttattttctgcaacagatggagaaggaaatggtatgcactgcccgtgccctctattcacccactgctggtcctgaggtgtgggaatctctcaagctctaggcatcgccactgggaggggatgtagctggtgatatgtacagttttagtgacttttgactatatggattcctgtcaagggaccttgtcaagtatctttacctagagaaagttagaagggtttaataagtctccagggtgttttgtttttttcttttctttctttctttcgttttttttttttttttttttttttgacacagttttgctcttgttgcccaagcgggagtgcaagggcatgaactcagctcactgcaacctctgcctcccgggttcaaggaattctcctgcttcagcctcccgagtagctgggattacaggcatgcgccaccatgcctagctaatttttgtatttttagtagaaacaaggtttcatcatgttggcctggctggtctcgaactcctgacttcaggtgatccgccctcctcagcctcccaaaatgctgggattataggcatgagccaccatgcccagcccagggtgtttttcagagaagatctaccagctattcctaatctagttcatacatgggtttggttctcttataggtgtccttccgctcccagttcattcaaaacatgcatgatctttcctcaatatcttatctcttcagtagttgttatgtcagtaaatggtgccttcacttcttccattacatgcaccagatggcaggagttatctctgatacctccttcgtcctcacccctaaattcccaggtctgttgattctacatacctatgtctcccaaatgttcccactgtctctaaatatccatggctactgtcacctcttatctgggcaactgaagtagtttcccatctagtcaacatccacatgttctcttcctcctacccgttctccatattgtaatgagaatggctttaaaaaaaaaaaaccacacaattctgatcaaggtaccctttgcttaaaatactccagtgattaccaatgctttgaagattttaagacaaaattcttaaactgaactataaaattctccttgttcaggcctcttctcttacctctcgtacctctgcaacctcatcatgcattagtcatccctcactcttagcattcagcctaatgagttttcttttggtcccttggatgcccattttctcttgctgccacaaggcatttgcacaagctattccatctgcttagaatggtatccttctctcacttgcttaataagctttcccttcacaactcaatttagtcatgacttcttttttttcctttttttttttttttttgagatcagagtcacactctgttgcccagactggagtgcagtggcacagtcttggctcactgcaacctccacctcctgggctcaagtgattctcctgccccagcctcctaagtagctaggactacaggtatgtgccactatgcttagctaacttttgtattttttgtagagatggggtttcaccacattgtccaggctggcctcaaactcctgggaacaagagatccacccaccttggcctccaaaagtgctgggattacaggtgtgagccactgcaccaggccttagtcatcacttcttccggagaccttctctcatctctcagtaaaattgtgttgtttctccctgaatagtatgttttatctctccagagcctcatgacagcttttcatttatttctgaaatgatttggctgcttttcttccctgttggactgtaagctccattaaagcagggaccacgtataattttgcttatgtcaccaacacttagcacaacacctggcacttaataggttcctttaactatttgttgaagatcatgaggaagggcatttactttgttcatgctattttcatactacagcttttttcctccttctacttaacatttagtctaagcatccctttagatgacactatgctgtttctcaccagccagaattaattactctgtgcttcagctggtcaattcagctaacattctttcagtgtctactacatgccaggcaacacactgggccttggagacataaaaatgggaaagacagtgtccctgatacaaagtggcccatagtttacctgaatgtgatgtatttgaatgccataccaggaatctgaataaagtgatgggaaaatacagaagcaggaccatccacttggcctgaggaagccatgaaacatttcagggaacgtgatccaggggctggacttgaaggttggcatgtgattccaccaggcatggaagatggaggagaagggaactgctgaggaggaagcagctggcacagaggtgcagaggtggaagatgagtgcatgcttggaaagatggtggtccagtgtggctgggatggttaggtccaccgggaggtaagaggagacactgggttgtggagaggccaggaaggtgggaccttatcctgtctggcatgaggaacctccacatggctttaagcacgggcttaacagcatcagatttcatttttaaaatgataacccagcacttgtgtggagagcgtatggcagctggtggtggtgaggatggaggcacagagaaaagcaaggcagtggttgcagtgacctgggctatgaaggagcagagcctgaagcttcactgtgaaagtgggaatggggaggttgggatgatttgagagaaggcctcaaagtccaagcgacagacttgataatgaagcctgggtggggaagaatgtggggagagtggagacagaacagcttggggtttttggtcgggtgaagtgacagattgtgatgaactggggccatcaccagggcctctctggaccctttcaaatggtctcagatggcgttagtggttaggagatgggctgaaatggaatagagagaattaacaggttaggccgggcatggtggctcacgcctgtaatcccagcactttgggagggtgaggtgggtggatctcctgaggttaggagttcgagaccagtctgaccaacatggtggaaccccgttgctactaaaaatacaaaattatctgggtgtggtggcgagcgcctgtaatcccagctactcaggaggctgaggcagaattgcttgaacccgggaggcagaggttgtggtgagctgagatcgtgccattgcactccagcctgggcaacaagagcaaaactccatctcaaaaaatttaatgggttacaagacaaaaactttttgattcataatttggatagaactcgagcagaaatttaagttggttctccatgaagaaggaaatcactggacttgttaatggtattaatagaaaattacagaagcatatggaatcccgttaagaaagtagatcctggtccctcagtagtagtcatcctggttgtgatgagggcatatttattttatctgcgtattaaggcaggtcccaaagggcctctatttggcagttttccaataatctagttactgtttagtctctaaaacatattggacaccattttgtgcataacactgagttgggagctgtgaggaagatgattaaatgagtcatgaaaatctcatttcttccaaaggctctgggaattcagacttccgagtttccctccgcatagctttaatttatacatttgaccaagtcctcctgtgactccagaacctcaccgaacaacctatttctgtctgcctgtactgaatctggagtatctgagcagatgtgttaccccagccaggtggacatcttaagtgtgtgtgtacacagcagagcagattaactttggaacaatgaatggcattaaaaagtcaaaacagaacaattttcatgtagggtgggtataaacaactgtataataaggtggtgtttataggaaacagtccaagaaggtcttggggaaaactctgagataattgcatgatttcctctcttatttcatacccgactatagtcactgacccagcagtgatggactgtcctcagagtcgccattgtcttatggaacatttctgttctgctgtcagtgctcactgtgggcaccaaggcagaggaaaattggggaaagcaccgaagaacacctaggaaaagggccagacccaattaccaaggctgagccaacaactgtctggtctgaccttggcctatgttaatgtcctggacaaggcccagtgctttaagggtgcgttgttggaggtgatacaaggactaactaaaacagtagctgctttaaaatgttgtatccccagagtctacaaggcctggaaaatagtaggtgtttaataagtgtttgtaagttgtttgaatgaattaatgaagaacaaattgatgaatggatgaatcaggttccaagccacagatctggagtaggaaccaggagacttaggggagctcatgaggcaggtggtaaagaaggtggggacaggcacccagatgtggcttgatgctcctgctgtgccagggctctggccctccttggtgcatggagaattaggtaacaggctagttacctaattatttgattcataatttgattagaacttgcacagaaatttaagttggatctccgtgaagaaggaaatcactggacttgttaatggtattaattgaaaattacagaagcatatggaattcctgttaagaaggtagatcacggcccctcagcagtagtcacgctggttgtgatgagggcatatttattttatctgcctattaaggcaggtcccgaagtgcctgtatttggcattattccaattgctgttacctaatgcctaatagaccctgctcactgggggaaaagtattctgaagtttactgccaggctcatgggttcagccagggcagggcttctcagatggcagtgcagtgcagcagttcttaagaacatggattctggagcctggctcccagcttccattcttggctctgccacttactactttgggcaagttgcctaatctctctgtgcctcagtttgctcacctgtaaaattgggataataacggcatttaccttgtagggttgttgtgaggatcaaatggcataacacatgtaaagctctaaggtaggcatgattgttgtttttgttatttgtaattgtttttattactgtgggtgaggaaagaatgatcagatgttgtctgtttttcagtttaggtttctataatgaagggttggtattgagccattggcaataaagccttttaggaaatgcattttgtcagttacctgtgaaggatggattggcagagtgtggtattgtggggaggtttatattcagagtccatggttctctgaagtctagggtaagctggcaggacttcctgaattcctgaaattataagaagaagagtgtgcaaaggggtgagaatccatagttctagtcagtcagtgctcaaaggccatttgatgggaagacatccatatgcctacagggtctggtaataaggagacctgagttttaggttcaccatttacttggaagagttgtgggcaatttagacttcattttttcctctttgtaaagtgagcagaataatacatctctgtttaccatatggcattatgataggataaaaataaagaagctgggtacagtggtgtacgcctgtagtcccagctacttgggaggctgtggtaggaggatggcttgagcccgggagtttaaggccagcctgggcaacatagcaagaacccatctcaaagcagtttgagaagattaagatatccataaatagaataaattctgttgttcagttgaatcatactactcacttgcattctgcctttctaaaaaaacagagttgtcatctatcctgggacacatgtaccaagggctcatcagagccacagaagagaatgtttactgtctctactcacccccttatccactatcctccccaggcactgtgccgattttcaactgcaagcctttgtgctgtttcctgaagtatttgttctttctacttctgatcatctaaactccactcatcctttcatgcctagcttatgtctcacctcttccctaaagctgtttgattattccagccacacagacttctctcttttctgaaatctgcagatcagcactgacttattcttcagctggctgagatttctaactcctttgtaaatgccttgggtataagagccatggttagttaatatatgtacatccaaaagcacatgaaagagaagaaatctgtctgtacagtagaaaaagcacaatggagaatggctccttctctctgccttttaccctgtgtgtgtccttgggtaagttatttaaactcctttgaacttcagtttcctcaactgtaaaatggtgataatacctacttcaggactgctgttcagcttaaatgatatgaagctgtgagcacggtaacgagcacatagtaggtattcagttaatgttgttttgacccccttctctcctgcaggggaagactagggatgagggagagaggtggaaaggagatactgttaaccccaccaaaactcaacattgaattatcagtggcttgcctaatctacagaagtgatgccttttttgtttttgagacagagtctcactctgttgcccaggctggagtgcagtggcatgatctcagcccactgcaccctctgcctcctgggttcaagtgattctcctgcctcagcctcccaagtagctgggactataggcatacgctaccacccccagataatttgtatttttagtagagacagggtttcaccatgttggccaggctggtcttgaactcttgaccttaagtgatccacccaccttggcctcccaaagctctaggattacaggtgtgagcgaccactcctggcccagaagtgatgactttttaaacaggagtgagaacttctcctaaagactgacacagagctaaaggacaaaggggatgtaagaatcctgacatcagctagagtctgagtttcagtagtaagttagcccagatctgtgggtttttataaaagaactccatgtggctggaataatcaaatgtcttggctcttctctgaagcccagggttccttgtaggatgtgatatgtactccatcgaccgaattaaagtgccttcagaggttcttagtgcggcccgctgcaaagcccagggagagaggggatgtcccagcggcgagcaaaagcagaatccttagcacccccgacccatggggaactggaaggtggggaccagtgcgactcatcacagttctgaagattctgcaccatttagagacagtgcagatttagcaattattctgaaaactctaaccctgctagaagattggtaggtttatttttgttttttaaattgtgtttctgagtaaccccctaggacagcctgctgggctgttggctccagagaccaggcaacaatgactttaaagtgattaatgctttcccccttcattattcaagataaaactttatcatcacaaggaactacttaatcaaaatgacaggaatcttctcagttatatgaaatttattggaacggttcttttttaatctctagtcataaaaccattttaagctgtaaatttcttagcaacattaatgaacgatttattgaagggaaaacaaattggattatcagctcccagcctgctttggtaacccaggtactttacagaagcttttgcctttgtaaatagacgtgcaagccttgcagagaggcagagctcctgaaaagttctgtgatgttgaagtcttggaaagtgaacccaagatttttattcaccttcaaggccatctcatttgtgcctcagtgatgattttctgccaagtggctaaaatagaatcagattggaacatgagctttccttactgaccatcagctacaatacaatgctaggagttgagtttcctttctttgtgcttcataatctatgacccgcagagtgctgcagttgcttcgtctccagcattattgattggcttgagggtggctttctccccatttgtattcctggtgacagctctaacattttgtgtctatggataaacagacttgtggagagcgaggattatacgcagggaagcaggtggcaggaatacattttgagaaagctcctcggggcaatggaattttccaggtagattcttcagggactcacacaactttcagagggctctgggagaaagcttgcatctttgacaaataatcagtgctttgcttgtttaaaatgtaggtaacttacatgtccgatttgtgtccttctgagatgctgttcttgaaaacctctggcctgtgccttgtgcctggctgagatggtggaaatacgggaaatggacttggagatggaaatttgtgaacaggtagttcactggcaagtgctcgtgggatggacaactttgaaggaattaggcaaacaagattaagcaaggggaaaattggactgctgggcagttgtggcagaggcatcacctagttggccccatgttgctcttgaattgagacacccttcacagttgtcctgccttgagtcaagggaactggatgtttataaccttctacctcttgaccagttattgatgtgggctgcctccaggaaggggccatgtcagtgggtgaggcagctctcttggactaaaagcaattcctggagagggctcagctgccaggagagcaaatggggctacccttggtttgcctggtgattatgtaataatggacctcctcattctccttgagaaaccttccttggctttctaccctcacagaatgattcctgccctcctttgagtctgacctctgtgttcttgtagctgtctctctctttgctggtctgtgaggtcagggagcaggtctccttcatctcacatccccagcctttagtgcagtgcctgtgttgaagagttaaatgtctttattcccccattcaggtgactctaccccatctttgcctgttccacttcatctctctgtcctaagatgtcagcatcttcttgatgtcattccaacccaagggcctttaaggggagaggaagatgggagatggaacctatgtcttggatccagtggctccactgctgcccaggaagaggggaccaaggctggcttcctggcgcacagcaagaacagccaagtcctgtgatagtggaccccaagctgaattttcagggtgtgtccatttgctcttcttcagctgtcaacttggctccccacttggtaccctgccgttagaggctttgaaagggttggggtcagagaggctacagagcttccctagattcaggagccttccagatggaggggaggacattcttctgctgaggcccttttaggatcatggggaagatagacatacacattggaaggcagaagagaaacttcagaaacatgagtgaagtgcagagtaataagacctaaatttacccgtctgggtatcggagttacagttcacctaacaatggggtttcatagcctcctgaaggtttcaaccctagccctgctcagtgcccacagggcgtcagacagtactcttctctgaggccagagtgaaacatcttggtgttcagggctggcttagacccctgcagtgtgagcttcccaaatcatttatccgtggacctcagcctctttccctggaaatggggatataggctcagagctgctcagaccacccagggctctgcctcctcctctccctctctccctcttcccacctcttcctctccctgtatggtttgctgggctgtggctccaccccgagcgtatccacttcattactctccagctgccttccactcctgcctggggctgacatattactagaaatggccctgaaattgttctcttccctgataaaatattcatcactgggatctgtatttttattgcgaacttaaagtggacaggctacatttctgttgtcatacatcatgggcacgcaaagcctgcagtgagcaagtggaaccggggctgctaggttatgaacactgcatgtggaggggcagggaggggatgcattttaagaaagagagtaataataccgatgatgatgttacagataggttaatgatttcagcatgagggcgcacattattgtataatgaaagttttgttcactgctgcatcctcagtgccccttttaaggtctgtcatcgtgctaggggttcaaaaatatttgttgagctaatgactttgaggaaaactctgaccctctcctaattcagctagggttgtaacctcagtttgctgctttgtcctggcttttgaagatgaactttggtgggatgcggtactctgaggactaagggagttttgccctttggtgctggtcagagctcagtgcagggtttgtgccttgaaggttgagatttgggtttggagacaaacgcacctttctctacccagagaccaggccaccctccctgtgtgtgatttgtgggtgtgagtctgtggaggtgctgtgaaagtgtgcatgagtgtgcaatgtgtgggaatatactagcgaggaggcggggaggtttcagcttaagcccgtaaaagtgctaagatcctttgaatgagaaggtgccatctctaaaccaggaaagtggggtttccttgacttcctctcttttgtgatggatttatgtggcaccatctagtctttctcaaggtgtgccttgtggttcactggagatctgagggtcaggagagagatggaggcactgaaagagagggtgccatctagcaatctgccctcagaccatttggcaaggctggaatacacaaggtttgtgtttgttgagtgggtcccctggaagatgattgggcatgagccatcctgctggtgttttctcttcttcctacctctgtcttctgaaggaaggctgcccaccagataaagggggtcccagaagcaagaggctgtatattgggcctcccgtgatagaggccagaggaaggaaagaatatgttgaacttaagtgggatatttcacacccagggacttgaagggggatcccctcaaggaaccaataaaagttttccacaaaatcctggcatttagaaacatttgccacaaagagaaactaacaaccaaccaatttgaagaagcagaaacagcctacagacagaggctacctccttgccataagcactcacttgagaagacccctctgctgcccgtagttctactcaccctgacccctcgctgtgacaccagggtgaagcccagatcagcaggaagagaaagcgtcagcctccagaaccccttctctgcaagctgagagaacaagcaacagatctcgccagtgctggggacaggaagaattttaagttgtgcgtaagactagaattgtgaggtgaacaagactgggaagtcctggaattgggccctagtcctgttaagggagttgctgcccatcagtgggagtctgtggagagtgggcatgacatagaatagttgggggcagttaggaaattgtgagaagaagagattctctggacttatattttcagagaggagtttgtgctatttcaaagcagccagcctttgacacactgtccctcataactgttagataacaggctggaacctattgggtattaccaacaaaccattgaattaatggctgaagcccatatatattggttgacagacatccgggacagaaatggtgcccatcaaaccctcttagaagcctagtggtaaattctgcactggtggcctcattagtatgcatgtgttggactccaatcagatcagggctgggaagtgttattaagccctgtgaggagaagtgggccagctgagcctgattaatattgattggaatttcttcctaccaatacatttgcttattaatgtcgatgtttggaggccctgtttttgaaagcatagccatgtttgttcttttctctttcacatgtccttccccaatttttttttaagacaattttcatttgaaaaagtattttgtgaggagccagaacgttagtgtgcagggagtttagtctatactctcatttcttttcttttcctccccttctcgtggtctttttctcgtctagtctccagcagcaagggacatggagggcgtgtaaattgcagcccttccagcctcctcccatattgtcttatgttgcctgacctctggagagagttttccctcaagtggtatctttcccctgattttcttaaagattcaaacaaacagaaccttccatcatttgagtccattcttgtgaaaaggtcagttctcccagggcaagggctatgtctcttctgtttatcactgcgtcctctagctgtggtcagtcctcagatatttgttaggtgcatgaatatatgatataaatgcacacatgtccaccctggttcccactgctccctgctgctcacctgaaccccagggggctgccctccctgctgatctgccaacctgtactgcctcctttcctctcatcgcctttgggcttccaaacatccttcctcctgctgatacacaaatataccatcctttgggcccagagtggcctccaagaggggagctgatatgacagcttcactctcttgccatgtttgattgattgcagtttggcagatgttgttgattagctctttgagttggagactggtactgatgagaccaagatgatagaatttaacttcatataatttgcccaagaataacaactcatggaccacagatttcacccctaacctagccagccactcatgaatgggtgtgattttttctggtaaagtaaggatataagagtcagcataatccaataccactggaaaaacagctcaaagccactgaccccctgaagggctagataagcagtttcctcttttaaatgaaggacagcgtaggattgtggctgtagaaataggggatgggacccagatgtgaggcttcctgcagacagtgctgattgtcacccacactcacagcagggctgaagatcagcccttccccctgaatgagctggaggagcatggggaggacccagtggtgccaaaggctctcaggtgagaaagagaccctaggagggagacagaatgtggctgggaccaactttgagcaatgaatgaaatgcattaaggtatgaaatgcatatgttattaaccaacacttgctaaactgctggatatgtgatagagaaagaatgtcttcattgtgagtggaggacccataataaatgcccccatgaacctcaaagtgtccttggaaggcagatgagtccaagataagccaatcccctccactgctttccaactcctgaaacccctggtttagagagttgaaattttggaatcttccccagcctgacgatcagaacctaagttgcacttgtacacgaatgtctcctgtttgggtggtgaatcaggccagttactttttggctactgtattagtctgttttcacactgctgataaaacatgcccaagactgggaataaaaagaggtgtaattggacttacagttccacatggttgaggaggcctcagaatcatggcgggtggtgagaggcacttcttacatgacggcagcaagagaaaatgaggaagaagcaaaagcggaaacccctgataaactatcagatctcatgagacttattcactatcacgagaacagcacaggaaagaccaggccctgtgattcaattatttcccactggatccctcccacaacacgtgggaattctgggagatacaattcaagttgaaatttgggtgggaacacagccaaaccctatcacctgtcaaggaagaagtgggcaaggcacttggctggttatgtgggtggccaggagtatgtgggtggagcaggccagaagacactgtccacatgggcatttgggctcatttcctagagggtcagaagagcattcttcccgcttggccttcagtggtatcctggaaaagtggctacactttaaaaagaactggatccctagggttttttcttccacttgagcagtgagaatgattcaaccttgtatttgcggataatgctgaattgtgagttccttggtggcagagagtttttcgttactcaggtttgaatttcccataacacctaacacagagccttctgccagaagatacccagcaattggtgggtggataaaaagccaagtgaatagaaaacgtgtttcacaaaacctagtggtctcagtgtccctcatagttccagaaggaatcaggatagtgggagctttaaaatgaaggctggtaactcttttgcaaagaagtgctgcagtagagttctcctacctggctaaggtaagaggggcaccctgtgcttctttctcttgttactttatttagaaagaaaggatgcagttgtccctaagagcagatgctggccgcctgccaggacttgcctttgggtcttatctgtttgtgttggcttgagcagtttgtaatgattgtagagggagcataagggggaagggatagggaagaataaatgtgctttccacaggcaggaaattgatgaggtaacttttttcttgctgctttctggtccattttgagaggctcctggtagacagagcttacaggctttggtgaagtgaggaagagaaatgttttatttccaaatgggtaagcagtctctgccattttctttgaacctccaaaatagctctataggaaaaaggcttttgagccattcagaattttgccagttattcttgaggccaggcatgcatgggttggggtcatgtggctgggatgatggggcatccttgggaaaggtgcaaagagaaattaaaaaggaaggtgcggggctgtcttgggtcaccttagtgctaatgatgaggtcctgtctggagtagtgaggagactgtgcttctaaagtttctgtttatttcatagtgatatcaattagtgactcatggaattagatggtatctaacttggtagaatcccgttcggtcagttcattgtcagttgatagaaatttgctgagcatttgttacgtgcttggcattcccatagatatcacagagcatgaagacttataaggcagaatccatatgcctaggaagtttcagcctagttcagattatagtcaggctgtagcctcttattgtgctttattgtatttttaaaatagtaatctaaaagtatttacctattcatttgcttttctgtttaagtcttcccctactagaatatttcatgagggcagggaccttctctgtactcttcatgattttaaataaacagtttaatctctgtctacttggcccacagtaggtactcagtaaatatctgttgaataaatggagtggataagtgctacaggagaggttagttggtaaaggttgatgtgaagcaggatatagtagcaaatctagttttaaattccattcagcatttattattcagcaccccttatacatagatcatagctcactttgcagagttgctctgatgattggaagtggtggagctaggatttggacacaggactgtctgactcctaaaccttcatctttccgccatacaattatgccattcacaaaaatggccaggttttcccaccaaatgtcctggagaccataggtcagagacagaaatccagatctggtctctgtgtgctcagaacaggattttattgtgacaatatgctggctgctctatggatgagtgacttacacagatgtggtggttccttcttttgaccatccagtcattgatgtcacccaggaaagtgtaggtatttttttgtgtgtgacattattgaaacagtgtatcagactctattatctgagaaattatggcaattccttcccaaagacatttctaatgaggttgaaagcctgctcagtcaggtaatttgggagcagctctctctggtagtgccaggggattggaggctttcatccactaatcgtagaaggccctttaagccctgggatcgtgtgtctttctcctgagttggctgcctcttagctctgtcacttggcaaagttttcctgtgtgctcctttcccacgaactcttaggatcaaatgaaaaccctcagtcctgaggcattcagtcctccaatttctctcttgtacccttctaaggactaggcctgacctttgaattggtatttagttcctaaagatggtcctttatttctttgcttattacttcttagaattgtgaacaaaaacaaggaaaagaacacggtgagaatatgtgtgacttcctcagagtcaaaggtttttttcccccacttaaaaacaatgggaatgtccatatctcacctctctcatgctttgttggttttccccaagttgttctgagacttgtttataatgggaagttattccctgaggagacctctggcttcttgggggctcaccctacccagggcacttacctgtaagttaaaaagaaccttgtaaagggatgacagctatgacatcattcaagataaacagaagaggctggccaaggtggctcatacctgtggtcccattactttgggaggctgaggcaggagaattgcttaaatccagcagctcaagaccagcctgggcaacatagaccccatctctaccaaaaaaaaaaaaaagccaggtgtgatggcagcacctgtagtcccagttactcagaatgctgaggcaagaggatggatcacttgagatcaggagtttgaggctacagtgagctatgatcatgccactgcactgcagcctgggtgacaaagtgagaccctgtgtcttaaaaaaaaaaaaaaaaaaaaaaaaaaaaaaaaaaaccagagtagaatgtggtggatcgtttttttcctctttctttttgattttaaagacctttcagattaagaaatgtcaagtcctgagctgcactgaccatggagagtgaaggaagctaatgatcactgaggccagtatctatgaggttctttgatacatcttttctcaaagaaagaagaggaagatgtggtgaaaatggtcatctcctttccaggtttaaaacagaatcctttgccccgttccagtttctagctgaggtgtggggtaagtcccatagaactaggtgatttcttcactggcctgtacccttgaccttcatcatggcctcgaggtgatcttgggccacttgtttggacagagggaaggccctttggtttcatcataaagagtctgtaggattaaaagtctgagaacttttgaaaataaatctattcatagtgtttaaatatgagcagggtacttaaccattctgcacctcattttgcataaatgttgtataaataagtctaaatgtataaataggtctaaatgaagaggttgggcaaagagagttagcacggcatggtgacaggatgccactttcagagatagatgtgagtctaaatctgtttcctcatctggaaaatgggggttttctacctcatatcataggtttacgtgtggcaagtgcccagccatctgcctggtgcctagaaggtgctcagtaagtgttcattcttacccttgttttactgctgctctgtatgctactcacattaccttaaactgctgtcattttctcttttttctgcatttattttatttctaattgacaaataataattgtatatatttatggggtataatgtgatgttttgatatatgtacacattgtgaagtaattgtcaaagtaattaacatatttgttgcctccacgtacttatcatttttttgtggtgagaacatttaaaatcaattcttctggctgtcactctcaatgtttgttttgtctgtcaggctgaggatacactccctgaaggtggggactgtgtctctggcatcttcattttcctcaatgtgtccagcacagtgcctgacacctgatagtcacttactaactccttccagtgcatagtggctgctcatagtagatgttgagttaaatgaatggatgaatatgatggagactaaacaaatacaatgtaaacttacaccctgttgtatcaaccactacagagcactggtgtcatgggcactgatgaaaccttaattatgagattacaacttatagatatcattcaataaaccagctcagttttaagtagctgttgaacacttaggagatagagagttgactgctgtttcaagagcaccctttagtgtaaacaatattagcagcacaaatcaagcactaattagagaaggtagttggaaaggatatatatttttctaatctgcatcgttgacgttgggggcttccacttaaacaacacattaaggaatatcacactcatgaagaaaagagtatttaccagaaagtcttttcaatccaatcaccaagggccaaggggtggggggtgggtaaagaattttgaatttgctgcagatgtcctgaggccattcatgatttggagagaggagcggggctccttgcttgctctttccttttgcttctttgagatgtttctttctgctgaggtgagtctttgtcacagctaacatccaacatctactgagcgcttgctgtatgccaggcatgttttgagctctttgtgttcaatgtcttggttaagctttatgatattcctgtggtgggtttttttcttttcttttttttttattatactttaagttttagagtacatgtgcacaatgtgcaggttagttacatatgtatacacgtgccatgttggtgtgctacatccagtaactcgtcatttaacattaggtatatttccaaatgctatccctcccccctccccccaccccacaacaggccccagtgtgtgatgttccccttcctgtgtccatgtgttctcattgttcaattcccacctatgagtgagaacatgcggtgtttggtttttttgtccttgcgatagtttgctgaaaatgatggtttccagcttcatccatgtccctacaaaggtgggttttattgcctccactaaggatcaggagcctgaggctcagaacggataaacttggctcggagcctcgcaacttgtaagtgaaggtaggattagaatccaagggtgaatccatgccttaaccactatactttgaggcctctccttggttttaatgcttctgggtcaagtgattccgcctgtggcaagtacctagagggaatacagaagggtactgggcatgtgggatatagattctggaacagatgaggtctcagccctgtggggtccaaatatagctaagaaaatgaagcagctgagcaactgtataattatccaaactgtaagaatttagaaatagcagaaaagatcatgttaggggccggggatcataatttgggtttggaagatggatgatgttaatctgagatggcttccagaaggagcctaaaggtgaaatcagagtagagtggggtggaaggcagtttatgggatagtgggtggaaagcacgatggggagggttcttcaacattgcggtggagtgaagtccagggagagcctcttcagatccccttcacaagggcactcttgcacagtgattcctggaggctgatcatgggagagcagggagttgggaaccacttcttatctattcagtggtgctctcagcaactgtatgacagatccaactctcagcataggtgtgaaggagagaacttggttttgatacttctctgatattttcccctcagcccattgttattctgttccataacctcatattgggtcttcaccatgccaagttacttgggctggcctcctccagggtgtacccctcacttcagctcttttctcttcctccttgccttccaattcatttggaagatatttcttgagcatgtactgtatgttagcatcagtgtattattagcctcagtgagtggttgactagctggttaaggtgatagatgaactcatactacattgtttttgtttgtttgtttgtttgttttgagatggagtctcattctgtcatccaggctggagtgcagtggtgcaatctcagctcacagcaacctctgcctcctgggttcaagtgattctcctgcctcagcctcctgagtagctggggttacaggaacgtaccaccatgcccaactattttttttttttttttgtatttttagtagagatggggtttcaccatgctggccaggctgatgtggaactcctgacctcaagtgatccgcccacctcagcctcccaaagtgctgggattacaggcatgagccaccgcgcctggcttcactatattgttaatgtgctgatgtggtctcctagtgtgagcacgtagaagttaagagacagaaccatgagtggttgctgatacttttagaactaggcagagaataagtagcctgagagggagcatgaggagcagtggctctaaagatgaaaacagagagctccattggagccacagaagcaaaaatgtgaacaaggaaagtcatgtggaaggatgctcatgattaggtgaacagaacagtttcctgaagtggaatgtatgccatcctattcttataagaagtatgtgtctatgtgtatttatagaaaaatgtcatagaggacatacacaaaaaggtcattggtagttctggattttaaaaaatacttctaaaggtaaggagtacagtagtggtaagacataaagcagaaattatctaaagaggaaagtggagggcactgtcaatgcacaatgtaatagataggacaaataagagagagacacagatgtagccattggctgtgacaatatggaggtctttgatgaccttgacaaaagctgatggaatggggaggggaggggaggggcagaagtcagactgcaacaggttaaggaagaaatgggatggggggtcacttagagactgtgtgtagactgctctttcaaggaccttaaatacctgcttttaaaaaaagccattaggattgaggctggaagaagttgtggatgaaagaaagacatttatgaaatgggaaagactggagtgcatctttaggttaaggaaagaaccagtcagataagttggatagagatactggagatgggaggtgggaaggggaagcatggttcctcaggaggcagaaggagatggagctaacaagcagagttagccttagtcgtggaaaggacatctctttaactatgggagaagggacaaatcgtgaatggacatgtgccgatggtgataaagatgatgtatatggttcgggaaggagagggtgctcatatgatggtcttgactttctcagaaaaaagtggtagatgcaagctctgctgtgagttaagtctgccctgaaacaaatgtcaccacaggcatcctcagtattaggttggatgtaagctcttagtctgatctggcatgttcctgtacatctctgatgtgtagcacagtatcagcatgtagtagatgcttagaaaatatttggtgatgatgcaaatatatggttaggaaaacaatgtggcattcctagtctgttcttcattattcctgtcgttccatgaattctccttctatttctggctccataataccagaggaacacaaacaaggaagtatctaaaaaaacagaaacgatgacagtgagagagtttggaatcacaaagaatggacaaagaagctgagaatctgtagcaggcaaaagcaagcttttggagagacccaaaagccctcatcagctattttgcaggctgccagttggtgggttggtatttgctctgtgtttctttgaagaggagagtcaggaccaagcagtgaaaagcaccaggaagcatgttttcttcaacctaagttgtctaaaagtagaaagactgtttcacaagctgagatctcctggccgctaagagcgtggaggtataggctggatggctcttggtgtgggtgtagctcaggggtctctgggcaagacggcctcttggatcccttctagctctagcgtcctctgtgccaactatagggggtcattcttggcctctggacctcgtgctgtcatcaggagtttctaccagatttgagtagaaatgcactgaactttttttatcacctcatagttagttggatactttatctagatctgccatgctttgctgctacaatgttggtttaggttcacaaacatgaccctgaacacttaaagttgccaaaaaattagcaaacgaaatagggtggaaagcccagaacatgatgattgacatttactagaggctcagtagatattaaaaagctagaaaatattaaacattgtctttttagtgttaagcatataggttatctatattcaatatttgtagtaatcatggggaaacaacttggtctagtgatgatgtggacaggagacagggaaatactgggcagaagagggtggttccccagcaaaggccccatcctcaagcctggatacccatgaccctaaatgagaacaggcattcttgtttttgttcccaaaagttgccttcgcaaccatcgcacccctatcctgtacccatataaaccccaaaccccaggctccagaagcagatgaggagacaaggagatgagacaaagagatgagctgatgagtggcagaacagcatggcagagaaggggagaagagaaggaatgtctgaatgctgagaggagttcagctggtgatgatcagaggggagatcggccgctagatggccagactccaggggaagaccatctttccactccattccccttccagctccctatccatcccactgagagccacctccaccactcagtaaaacccctgcattcatccttcaagtctgtgtgtgacccagttcttcagggatgctggacaagagcttgggatacagaaagctgtcacactggccccctgcccttgcaaaaaggaagagggtccactgagctggttaacacttaagccattcacagatggcaaggctaaaagaatgcactgtaacacatgcccatttgggctttgggagtcgcagcctcccaccccttgatgcttctatggggctggagcccagggatgcttgctccagctcctgcacatctctgtctctgtgccccccctccaataaggggttagagcaatggtggcaaccaaacagaggatgcacatccctgttgcacatcctgtgaggggtgtcagggaactctaccatttcatcaagaatagtgcccattttgaaatcagacaaacccaagtctcagtttctcctccaccattagctgtgtagctttcttactcttagacatttcagatcaaagagaacgtgcatcactgtaattttcaccagtggatgaaaagttctgctctttgatgcaacatgggacaaactgaccagttcctcaggtagggaagtaagtaacctctctgagctttattttcctcatctggaaattaagggaggtggaaatttcccagagtagtttcataaattgagtaatacctgtaaaatgttcagcgcagtacctggttcacagtgagcagtcttcatttatctcttttctttatttatcaaaatatttaactcaatggaaatcctttgctgattatcagtattgtccctaatacactattgtttatatactgtcagtatagtgatcatttgttttacattatttctccattcctttccatcccttttgcctttttagatcatcgtgtacaatcctatgaggtgagctgggcatagattagaaaatttatgtcctagatggagatgctgtggcccagcataggtcacagctgttagggttatagagatggagagagagccttgcttatacccagggacctgcttgctgagccagccttattcttgggggacaactaacatccagattttatagctgggtgcccttggttctcaggtaacttgttaagtgtgaaattatgaaatatatatttgatcttcctcccagtttcctgacatacaactcctaaaatccttggaatctctaaagttatgtgtctttttgaatgttaaggagttgactggtggctggcagccccttagtagcttcaggatgaggctcatcactagaaagaccaatgcctgatgagacagatgggactttcagccccatccctcaacctctgggaacgggagagtggctgaaggttaagctgatcaccaattatttaatcaatcattcctacataatgaagtctccatagaagtccgaaaggacagagtaatgatgaacttccagatagctaaacatgtgaaggctcttggagggtggtacacccggggagggcatgtaagttctgagctccttccaccatattttgctttatgcatctcttcatctctatcttttgtgataatctttataataacaatttagggtagatgtaagtaagtttccctgagtcctatgagctgctctagcaaattaatcaaacccaaggagggagggtcgtgggagcctcaatttatggctggttatgttaccgatggagggtgtccaggttgttggcattttgaacaaagaattgggcaaaatgcacaaagcaaggaaagaatggagcaacaaaagctgagatttattgaaaatgaaagtatcctctatggggtgggaacatacccaagcataggggctcaagagccccgttagagaattttctggggtttaaataccctctagaggttgccattggttacttggcttatgctctatgtaaatgaacaggatcaagtaaagttacaaagtcatttactcagtgtaggccctgtgcaaatggagaggctatttcctgtcatagctgaagtgtttccatttgatttagttctaggaagtcagcatgaatcagctttattttcctgacctccagaccctgttctcctgccccagttggtcaaaagcacaggtaaaacaacttggggcctgtgattggcatcagaaatggggctcagttttgtggggacaagtccccaacctgtgtgatctgaccctatctccaggtagatagtatcagaattaaattgagttagaggacacctagctcatgtcactccagaattgcttgcttgcttggtatgtgggagaaaccccccacacatgaggtgtcagaagtatagcagcagaggccgggcacaatggctcatgcctgtaatcccatcactttgggaggccgaagcgggcagatcacctgaggtcaggagtttgagaccagcctggccaacatggcgaaaccccatctctactaaaaatacaaaaattagccgggtgcagtggcgggcacctgtaaccccagcgactcgggaggctgaggcaggagaatcgcttgaacctgggaggcggaggttgcagtaagccgagattgtgccactgcactccagctcgggcgacagagccagagtctgcctcaaaaaaaaaaaaaaaaaaaaaaaaaaaaaaaaaaaaaaaaaagcgtatagcagcagaatctgagtttgtgttttccactcattgagaaaggctcatttcatttctttataatgtacctacatgtctttttgtagtctaccttttggattttccattgtaatgtacaattacattttttaaatttgtcaacttttaggatttttttccttgattcaggaaggcaaggataatctttttcctctgacactgactttgcaagaggttgtcagtgatattagcgatacattgggattgatgtcaggtagccagtagagacaaaattcaaaccatctcctgctttgtatatccacttctttatctcagatgtggctttctctatgcacctgtccctgggagccacccctcagaatcaaccccttcatcccccagcacatgcaagttgcctgtagctccaggctgcatttatttcattctgcttcaatttgtttttttttaactgtacctttagatgtttaatatacctctagactgactgccccaggcaagcacagatgtttcaatccctctttatattatccctatgcctagcctatagttggtactcagcctattttttataggcacattcctttcacaaacacaaatacacacaaaaatgattggggagccaagagaggcttggtttgattctagtggacagtcactatacagtttatgtgataccaggttatataggtgcaaccctgagccaccattagagtttatgtgctttgttcctagaaacttgcaccctgaaagggagacattttaccttagcactgtgagaagggagtaatgatctctagcccacattctgctctggaattacacccctaggaagtatttgagctcatccagagccatgggagggggctcggtcctttgccaagtcccatgccctgcccagaccatgatcctgggagatgtcttactcccaaggggactttggatgagggtcctctagagagctgtgcagccctgtgaggctcagcagagaccctggtgcaagctttaagagtggtgttgggcatgacaatgtacagtgtagcccctgggaactagggactcctggagggtgtgagagatgctggaaagaacacggaggactctgcagctgtgccagaggcagccatgtgcccaggggctggtgctactgaggaagacagcgagccacagacccaccacccaggagtgcgtgtggagtggagcagaaggataggcatcaggctaaaaagacctttgcgctgatgaaagttgggggtcacccttggcatacattctaacatagagacttttcattctccaagcaagctcctcactgaggagctataatagtgtgatttgaagtgactgagctgcaggagaagtcacttaaggcagtgctgtcaagtcataaggtgacgcagcaggaaagtggtgctaactagatgggctaggaatattggccccacaggtgaactctgaagagtagcttggttgccctgatcagtccagcccattcttaccccataagaggggtaagtgttaaagcccacagctttaccttaaaccccgtgctttgcagcatggacagtcagccttctctcctggccttctcatttaggtaaatagggaatgctcttgaaggaggctctcccaatctcctggcctcggccgtcgaattgaaaaagggtctgcttcttaacctctgaaaataaactgtctgatctgtgctacctaaggcaaagatggcgagctctggatcagctacttctgcccttcaccttgtctttgggcatgaaccagatacatagcatctcctccatgcctttccctttcttgtcaggaaagctaatgatgttggagacccagacctgctgatttggttactggccgttagattcaagtcaacacatgcagcctgggtaaatgaggctctacaggcatgcgggcgcttggagggcatctctttgttctttggctccatgaaatggctctgcttggcagctgccccttgcctgcagtttctcctgtcatggtcttggaaggcaggaccatggtgtgggtgggaagagcttggaacagcacatctttcatttggacccagctgcttctctgtatccccacactcaggacctggcttctctctgcagcaacattagccgcctatactggagagtgactaataactcatcttctctgcctgcctttctcaggggtaaggtaaagtcaagctcagtactcttcgagccgtgaaacttcttttctcatcttgactccacttgagagggagccttccaagcaagtgaaatgccatcagtacggtgcacttctttccccaacccttgggaagtggctgtttcctagcctggatcactacattaatatccagatctacagctgacatctttggatttcttatgactttattgcatgaacagaagcatttttaatctacagaagactctgctttgtgtgacacacgtttaatgtcatccttagactgcctctatctgtaaaatgccagctcttaaaatattaatctctaatgtgcactcaagactttactcaattaccatgggatttttcaaataagcatcatcattcccgcagccctgactgcattaagagaaaaatgcttaccggcccattgtttcctgagcgtgggatgatggtcttgctttgtttccgtaaatgttacactggcacggctgtgttggctactgcagatttattgtcattcatgcccaagctcaagcattatcagttttcctttccagtgccaaactttaaaaggtgccgtctctgatagggatcgtgaatcataattatggtaaatgagaggcagttgaaactgttctgtcaaagctgatttgtcagagtgcggatttcagtccggagagggagcagcctcctcattaccaccagcagtcattccactttgattattttttgaaaatcacatcagtttcaaagacctttattttccttctccctgaagacagtcttgagtgtcagtgttttgtgaggggtacccatataatacgtgctggcattttctcccacttttatccctttctgggtattgaaacccacctgtggccaccttagatgaccattttcatttccagtgtgtatttaagaaagcccaggatacaatagaaacgtgctactaggaaacagtttgttaccttgagtcaagattcatctcaggcttcctacaagtaacctcctttggctgggttttgtggctcgtgcctgtaatcccagtgacttgggaggccaaggtgggaggattgcttgaggccaggagtttgaaaccagcctgggcaacatagtgagacctggtctctaaaatatataaaaaaaaatgtagctgggcatggtgtgtgtactcgcggtcccagctactcagaaggccggggtgggaggatcccttgagcccaagagtttgaggctgtagtgagccatgattgcaccagtacattccagcttgggcaacagagtgagaccccccactcaaactctcccctgtgcattttgcagttgcctgtgcattttaattttggttaaaagaccagagttaacttcatggcagcagaggggtagggaaaatggggaactcaaaagcataagctaatatttcaggagctctgtgttctgaaatccaattagggaagacagatcccctctgctttgatagaaaccagtagcaaacagcacactattgtgatattttgtaactcttcaagagcatctatgcttatgtcccaaatgttccgagacctttatagacctttcgagaggcctcattccctggttctttcctagcccttgagctgttcccagttgtaaatcaaaaaccaggaaagtgactgccactgaaatctgtgaccctgactcactcatccctacatctgctctgccctgctctgtgctccaaggtgcttttcaagggtcctgaccccacgctactctttttgtgaccctcgaacacactggaattgaagtgatgtgcctggctaaggaagaggtattgtcgggaaagttaacccaagtaatccagcacaaaggccaactctcgttggcctcctggaccccatccccttgcagatatcaaatactgacaggcccagccatggttttatttgaggcttttaaagttaaggtcccatatgttaaatatcacaacttgagtactttaattttaaaaacatgtaaccctggagttttgctttgtggttaaatctcccttttctttcggtagttccagcagctttctaggagaggttggcattggcatgtgtccccccatcagtccccgccagctgtcccttttgctcagggtatctcctgttggtatctgtgatttagtctgactttgtaaatattccctccaaaccccacagcactttagaggagaacacagtggcagcagacataaacaatgacacttatgaagccacagtttctagctggagaatcatcttttgtttacagggagtgacagtcaaaagaagaggcaaaagagatgaaccagggaaatgagagggatgaaggaaagagcaggagacaaaggaaattcgccaggatttattgagcatcctcctgaatttggagtctaaattagactctggtggagtaagaagggaaatgttataattctgtgttgcagatattgatgtaaggtgaggaatcctgcatactgtcaggcctggtgaggtagctcggaagtactaaagagcagcatatcagcaagttgaaagagatcatctagattgagatgaatgcatgaatcttaaagaggtaaagaatcaaagggtgagattggctggggaaattttcctggaagtgaatgttaaacccattttgaaagatcaaatgttggaaaagactggccaggagccttctgtggctgggggatgggatggcatgattacaaggcccaggtttgggcaggaatgaagttaatgactggggtggagaatctattttggagactgataagatgaaattagtggcataagaggcagttggagaatgacgtagaagaagccaaactgatgggtttaatttaggccataacacaatgggaatccactgcaagtgggaccccctgaaggtagggacttgcccacccttgttagactaaatgcttcctgacaacaaagaacttgccttttcttttcctttatattacccttgtcatctgttgatttttgtttttgctgactgaccaaccgaccagactttgtgtgtgcagtactgggttgctttgaaaacctagagtatacacctatcagggccatgggccatgggccctgcctctgaggccctctccatgcttttgctgccacaaaagtattacaccacaaacccagatgagggatgaaatgcttcgggaaccagctaggcatttctttattgcacttgtcctcagagcactttcttctagagactccaaggcattgtaccagcacagtaacctttaagttgcacaagtttattttatagtgaacattttcctaacagccatgataaatgagtttgaagattaggaccggcaggagtggcactgaataggatgtgagtgagaggcagggatggaaaggaaacatccaggagaaacccatagttcacatgctgattagaggaggtgtatgtccaagatggtggtaattttgatccctggatttgggatctgctgatggagcaaagattgggaaatgccttaggggcaagggagggtgggctctttcctctacctcttctcctcctgactctgtggtgggagaaatcatgcatcccttcctcatatggacatccttattggcccctttacttctggcttttagtaccccctaccccgcccccaccttttcctttggcctagggaagcttataaatgctttcagcatcgtcttaggagaaaggtgggaagacaggcaggcagccagaaaatcttggtggttattaaactgaggcttcaaggacctttttattagcaattagactcagctctgcagcactaaagagtgtaaattcccactgtgtctcctttgcccaaacctccaaagaatctgttttatatggtgtttatttataacccagaatagacctgggcctgggagccctggggatgctgagacttcaatgtgctctcaaacagaagaagagggttagaaaccccagggagggaaacagtatatacccctttctggtgtacacctcccctgggccttggcatgtccctgtttgtgactgagagctagttttgatgcatgacatcttaaaaagtgcttttggtgctttgctttgcttgtttgtttgcagtctctggtgtgaagattgtaataccacaaagacacatgtgtcatcagaactttgatcttccaggacatcattagatcacttaaactgataaaatgtgtaaacctgtataaggactttctttagacagttagttactgcagtaactcattataagaaaaggatttggtcaggtgacttttctacttggcagataaagggggaacctgaggggaagggtgacagttatttgatggcaaaatgttggagatagacagaagtgtagtaggtactgacttaccctgacacacccacataccctctgtaggcttctctgcagccagtgttaggtgtgtggagaacagctggctgtcatctggattaagcataatcaacaggtatatgtggctgttgaatccatagctttgaccccttagcactaagtgacctggatctgatggtgacatttttaggactaatggttttaagtaaagaacatccctgagaaagcagttcagtgttcttggtgtcttcaaatgctgatgaaagatataggaatgctactcattatgataatggctttttaaaaccccagctttattggagtgtaactgatacacaaaaactgcacatattaatgtgtacaatttgatgagtttggacatatgcatgcacccatgaaaccatcaacataaagtaataagcatatccattacctccaaaagtttccctgtacccctttggggtgtgtgcgtgtgcgtgttaagaacacttaacataatgagaacacatggacacaggaaggggaacatcacacaccggggactgttgtggggtcgggggaggggggagggatagcattaggagatatacctaatgctaaatgacgagttaatgagtgcagcacaccaacatgacgtatgtttacatatgtaacaaacctgcacgttgtgcacatgtaccctaaaacttaaagtataataataataacattgaaaaaaagaaaaaaagaacacttaatgtgattttccttggatgaagtatgctgctgctggcccattattagtaagtataaacctttcatgtgtatgcagtgttaaaatctccaaagcactatccatgggcacagcatatctttccattttttggtgtgtttactttctttcatcaatgttttatggttttcaatgtacaaatctttggccttcttggctaaatttattcctaagtattttattctttgtcattctattttattcttttttgttgttcttttaaaaatgatattttttcttaattttctttttggatcatttattgtttacaggaaagcaactgatttttatgttacttttgtatcctctgattttactgaatttgtttaacgggttttttttttgcagtctttagggttttttacgtataagatcatgtcatctataaacagacataatgttatttcttcctttccagttcatatgccttttatttatttttcttgtctgattactctggctagtatttccaatactatgttgaaaagatgtggtgagagtgggcattcttgcttgtttctgatcttagcaaaaagactttcagtttttcaatgtcaaacatgttagctgtggcttgtcatatatggactttattgtattgaaataaatttattccgtacctagtgtgttgggagtttttatcataaaagtttgtttaattttgccaaatgctttttctccatgtgttaagatgataacgaaggcttttgtccttcattctgttaatgtgatgtatcatgctaattgatttgtgtaagttgagacatccttgcaccttaggggtagatcccagttaaacatgacgaacgattctttcaacgtactgttgaatttggtttgctagtattttgttgagtgttcttgcatctatgtgcattagggatattggcctgtaggattttttttttttttttttttttttttttgaaatggagtctcactctgtcacccaggctggagtacagtagtgcaatctcagctcactgcaaccttgcctcctgagttcaagcaattctcctgtctcagtcttacaaatagtgggattacaggcatgcaccaccacgctgggctaatttttgtatttttagtcgagacagggtttcaccatgttggccaggctggtcttgaactcctgacctcatgtgatctgcctgcctcagcctctcaaagttctggggttacagatgtgagccactgcgcccagttggcctgtaattttttaatgatgtctttgtctggctttggtatagggtaatgatggcctcataaaatgagtttggaagtgttctttttcttcagttcttttgatgagttggagaaggattggtgttactttttatttaaatttttggtagaatccaccagtgaagacatcaggtcctggacttttctttgttgtgaggtttttaattactgattcattctctttgttattagtctgtttagattttcctgattcattcttggtaggttgtatgtttcaagatatatgtgaaaagatgctcaatatcaccagtcatcatggaaatgaaaatcaaaatcacaatgagatatcacttcatatgtgttaggatggctattattttctagaaaaaaaagataacagatgttggtgaggatgtggaaaaatagaactcttgtacattgttggtacagccactatggaaaacagtatggagattccttaaaaaaataaaaaagagctactatgtgattcagtgatcacacttctgagtatacaaaataattgaaatcagtatctagaagaggtatctatatttccatattcatttcagcattattcacaacagccaagatacagaaataacctaaatatctattgatacatgaattgataaagaaaatgtggtatatacatacaatgtaatattattcagcctcaaaaaagaagaaattcctgccagttgcaacatcgtgaatgaacatggagaatattctattcagtgagataagcctgtaacagaaggacaaatactgtatgattccagttatatacataaggctatgaaggcgaaataagcccataacagaaagagaaatactgtatgatttcacttatatgagggatctaaaaatagtcaaactccacatgtatgtagatgtttactgtagcactattcacaatagcaaagacatggaatcaacctaaaagcccatcaatggcagattggataaagaaaatgtggtacatatccaccatggaatactgcgcagccatggaaaacaatgagatcatgtcctttgcaagaacatggatggagctggaggccattatctttagcagaaacggaaaaccacacactgcatgttctcacttataagtgggagctaaaagataaggacacatggacacacagaggggaatgacagacacgggagatggagggtgggaggagggagagaatcaggaaaaataactaatggatactaggcttaatacataggtgatgaaattatctgtataacaaacccctgtgacatgagtttacctatataacaaccagcacatgtacccctaaacttaaaggttaaaaaatagtcaaactcatagaagcgaagaatagaatggtggttgccaggtgccgggggtgagaggaagggggtcttgctaatcaatgggtataaaatattagttatgcaagatgaagaatttctagagatccactggctagcattgtgcctatagttaacgatactgtattatatacttaaacaattgttagcagtgtagatttcatactgtgttcttgccatgatttaaaaaaaatctccagagtctttatatattgtctcatctgatcttcacagcacctcatactcaaagaaggttttagtgctgctagtgcatactaagtatgtatacttaagctgagcaggtttacttgacaagttcgaggttacagaagttggtgagtggcagagcagggccaaggtcacatcttctagctctcaagcactgcgctctttcttgtcccatacttcgccactgttgctgcttgggctgttttctagcggcaaatgtgcttggactgagccattcagactctctcagcctctctttctgtgagaaagatagagcttttgtgaagccagagtttgggttttgaactatgaagttgtggttgaatctttctctaagatggaagctacaagcttgggttcatcagcacaatacttcaactcactgaactaccagcttcatggagcgaaaagaaagattatttaaatgttggcatctaattacatttacctagaagttgaagtgtaggctaaatatagcttgaatttaatttctgttttataaaccctacaatgttctgttgccaaagagggcatagaatttttaatagataattttcagaattgcatatgaagcttatgtacagcatcttttagtaaaggagctgagaattagcccagctcaaaatattttccctgctttgaaaatagactcctcttagccttatggaggatgacaaagcctgtggttgcccattaaccaactgctggttattacttgttaaaatgctgttattatctctactggacagaaaaatattaaaagcaaattatattcctttttgtgtacatcttcctttgaaaacttttctttctttaaaaaaaaaaagggggatacgtgtacagaacgtgcaggtttgttacataggtatacgtgtgccatggtggtttgctgcacctattgacctgtcctctaagttccctccccccaccccccaccccccagcaggccctggtgtgtgttgttcccctgtctgtatccacgtgtctcattgttcaattcccacttatgagtgagaacatgcggtgtttggttttctgttcctgtgttagtttgctgaggatgatggtttccagcttcatccatgtccctgcaaaggacatgatctcattcctttatatgtctgcatagtattccacacattttcttcatccagtctatcattgatgggcatttgggttggttccaagtctttgctattgtgaatagtgctgcaaaaaacatatgtgtgcatgtgtctttatagtagaatgatttatagtcctttggttatatacccagtaatgagattgctgggtcaaatggtatttctggttctagatcctcgaagaattgccatactatcttccacgatggttgaactaatttacattcccaccaatagtgtgaaagcattcctctttctccacagcctcatcagcatctattgtttcctgactttttaataatcaccattctgactggtgtgagatggtatctcactgtggttttgatttgcatttctctgatgctgagtgatgttgagctttctttcatatgtttattggtcacataaatgtcttcttttgagaagtgtctgttcatatccttttcccactttttgatgggattatttgtttttttcttataaatacatttaagttccttgtaaattctgggtattagaccgttgtcagatgggtagattgtgaaaactttttataagtagatatgtagcttcctttctgagaactacctagaagatggagatttggctggagggtcatcactggctatgagaaagaacactaaaatgtgggccaaggccaaagctagagccagggttgggtcaggggagctactgcccatgagagctgggctcaggacagcacagccagctctgtagagaagagaaacctgagcaggggctggtctcagggcccagatggagccaaggtgaggtcacctcaccaccagtgtaacatggacaaaagtcttgcctttcctagccactaaaggctctgttctttaaaggactagtacttttactttgggtggtaaatctcttagggttggagtagttccagaggtgtggtgacacatacttttgactttagtagggtaattaggattacaaagtgtggagaaacttcagcatctttcaatgctctgtattctttaggaataggtgtcttccaaagtctcccagtacctggtacaggaccttataatcaatcatcctttcatttctgttgcttataatgggtccatgacaatggtgacaatttttaacaagtttaaaagctattcgaggctatcagcagtaaatggaaattatgttacgtatttaagtactgttgactagtagctgtgtaacatacacacgcatacacatacacacatcacatatctagtgctgtctgaatgaatcttacaattgagttaaaatgacacccataatagacacattttggtaaaaagctgttcaatcagtggaacagacagtacacacagtaggttcctgggttaaattgcaagttggaaaatgcaaaagagacttcctggagttgggaaatcaactggattttgtagactgagtaggtgttggaaaatcagggaggatggagcagtgtcttctagatgtgaaaatggtatgaccaaaggcacggagctgtcaaatcctcttttattcaggattttaggatttgtcaccaaagccaagtggggagaagggaaataagggtggaaagttaaggtggagctagagtaggatgtcagcaactgcctgccccagcccggccgaggaatgggtaagtgattacaggaaaccagcaagcccacctcggctcagtgcaggaaaccgtagtaaaagccatgtctgtcagtgtctggtgcttcatcttcatactttgttggggtctgggattagtctgtcatagagttaggtgataatgtagcaagccaaggagctattgtataggtccttggaaaaaagaagtgttgcgattttaagattaatgcgtttaccacatggattgttaccacccctgtctcccactgtagggcgtatatttgtgttgtttttcatagtaggtatgagggagctagatattttcttctccctttgtgtacctctactcagcatcaccctagccaccaactttttatgccccacttctgacacaggcagacgtctgcaggatgtcagggagttgagatagcaggtgttatctctgcttgtgggacagagggcaactacttagtctgttcaaaagcggaagttatacctcttgtcttctgacactgaacagtggctaacagagctcattggcttaaatccctttgtaaattgtaatcattattctcttgagcaagaattctttcctagaaaggacatttttcagttaataaaacatcagtggatgtttctgtggagactgttttgaagatttggttaaacgagaaatatatcagtgaaagcacccagccctggggtttctggaactacaacattctaggagcagattttacctctcctatataaaataggcctagttatttccttggagggttgttttaatgattagaaatagtatgcataaagcacctggtgcatgggcactcagtaaagggtagaagtcatcaatactgtctactatttatatagattcctcctcctgagttgggggtttgctgtggtgcattgattcagtgagatgcttttaaattaagaaggtggctgcagcattttctgtaagcagtgaccacgcgaagccggccaggcagaggcaggcttcgtgaagactcaacctgacatagtcactgacgagaagcaatctttttagttttgctttgctgagaaggtggtgctgattgctttcttccattgggaaatcaatttattgtgcagcaaatcttagtaagcagtttcatactattgcttttctaaaaaaagagacatgtttctgtttttattaatcatggaactgacagaagatggtagaatttgtaaaagaaaataacctgtttgctctcctttttaccacacgtactgtcttctataaattaggaataaagaagggatttttatcttccagtcttgaagctataccctcttctggtttgagacaaacagcctcatgtccttggagacctgccatatatgaatttctggaataaaaggaattttcagagatttttgttggctgtcattttgaaggcaaagtaacagccatggttccaggagatgcccaaaatagctgggcatgtaattttggggctagatgcttcctgatcacaagcttgaaaacatgtcctccttggagttgaatctaagatcaagtaccattggtgtggagaatgagaggtttgtgtgctatggttttctgacatatacagtgcagctaattttttttttttttttttttttttttgtgatggagtctcactctgttgcccaggctggagggcagtggtacttactgcaacctccgcctcccaggttcaagcaattcccgggctaagcctcccgagtagctgagactacaggtgtgcaccaccacgcctggctaatttttgtatttttagtagagacagggttcaccacgttggccaggctggtctcgaactcctgacctcaagtgaccccccagcctcggcttcccaaagtgctgggattacaggcgtgagccactgtccccagctgcagctcacttttatatagtgagataagattaaaaaaaaaatctcttctcttgggtgaagagagcatttgataatctgttttataaaacagccatctgtacagtttccttaaagagaagtcgttcttcatccttttgcaataggtttgattaccctattttatttttacatacaacactggttatgtaaagttaagggcagcctcatgatgggccagcagttacctccatgcaggtaggaggcagcgaattgtggcccattttttgcctctgctgagtattctacaccaatgaccaagcagcctctggggggcagcagaacaccggataagactactgtgccctgggctgtcaggcttttctgacttgtcatccaacccctcgtttgtgtccttggctcagtgcccaaccttctctttgcctagcaaaactcatcctcttggccttgtcagaatgagagccttcgcccttcagcctcctttgccccactgtcttcactcacacccttctcccctgcactctggaacctttgtggtctactttgtaccatgtcacatagcttaatgatgggaattgtttgctattgtttcacaagcaggtttgcccatccttatagcaagaacaaagtcatgtctgtttcccataatgccaggaattccctgaaggcctaaagacatgctcaacagcaggtggaatatccattaatctgtagtgagtgcttgatgcctatttgctaatttgattgtcaagatggtcctgtttttgcacaaaggaaagtattggctttgctttacttatttctgaaactgctacattctcacatgccttcaagtttaattgttcctgattggggtgaaatatagaggactttaaaaattagcccagggttgtaatggaagcagtaagttggctgtacagatgcagatttgcatctttgtctttctccttcccagctgtgtaccttgggcaaattaatttctcaacctcagtttcctcacccataaaatgggattatctaaggtgatcaaataatttattatctaaactggaaactggaacacatttgagagtggaggatgttaaagaaaaaccagagataggtagtagttgaagcagtaaaaaaaaaattatttgggaactgttgtaataggggaaaagagacctcagtatggaactggactcttttttttgagacggagtcttgctctgtcacccaggctggagtgcagtggcatgttttcagctcactgcaacctccacctcctcctccctggttcaaatgattcttctgcctcagccttccaagtagctgggactacaggcccacaccaccatgactggctgatttttgtatttttggtcgagacagggttttgccatgttagccaggctggtctcgaactcctgacctcaggtgatccacccgcctcagcctctcaaagtgctgggattacaggcaagagccactgcacccagccagaactaggcttaattctgaatacagcttggataagggggatatagccaaggagcaaggtgggggtcattgagtggaatattaagaggaaacattgggaaataggaggattctggctaaacagacctaacaggattcctcctgaaggcagccagggtgatcagacaccaagagtaggtgatgaagaatttggccagatgatggagcatgatcagatactgcaggtggggggttcgttctaaactgacttagcaggattcttgctacaataaagatggacaccaaggttgaggcctagagagcttagaggagcttgactaaagtttagtcaaggagagagtctttgtccagtggcacagttttatcatagagtcttttaaaagatttattgcctgataagttgtttttatttttagcctgcctacctatacagttgttctattaagccaggtatagtgactcatacctgtaatccttgcacttgggaggctgagacaggaggttcacttgaggctaggagttcaagaccagcctaggcaacttttatatcatctctacaaaaaaagttttaaattagctgggtgtggtggtgcatgcctgtagtcccagttacttggggggctaaagtgggaggattatctgagttcaggagtttgaggttgtggtaagctgtgactgcaccactctactcctgcctgggtaacatctagagatgctatctctaaaaataaaatagtcctgttgaaaacattttgaatagaacaatttcctctctaaaaacaattttatttcctcttcaaaaacaagtttgatctcctcccctaaattaatatataaacaggacaaatgctaaattgtttaaaatgctggggcagtaggtataaactatacatatggtgctttaaagaatcaaagtggtacatgtaagtgtctagtacttggaacatactgtgtattcagaaaaggattttttcattttccttcctggaggaaggttggacaaagaagcactgatcagcaataaaggcctatgggctttttaaaaaggctattgcaagaagggtatgctcctagctttccaggtcctaacagctcaaggtgtgagttttgtccaactcaagcaggaaattactgattgaagaacatagtactgtctctacgtactcaggcagctgtctcagcaatggagaacatacccaggggacagctatgcattttgtctggtactttggctgccctgtgagcacagagctcttttctttattgtgaattcacgactgcttctgggcaacctgcctagaaagctggggaaccgtctctggcacccatctgctgcacccagctcctgcctgtttaggaacgtgatcttaccaattgcatttaaataatgggtttaccataaacttaatagtttgagctgtaaaatccacacttgctgtattagtccattttcatactgctatgaagaaatacccaagattgggtaatttataaagaaaaaacactttaatggattcacatttccacatggctggggaggcctcacaatcatggcagaaggtgaaggagaagcaaaggcacatcttacatggcgccaggccggagagcatgtgcaggggaactgccctttatacaaccatcagatctcgtgtgagacttattcgctatcatgagaacagcataggaaaaacccacccccatgattcaattacctcgcgctgggtccctcccatgacacgtggggattatgggagctacaattcaagatgagatttgggtggggtcacagccaaaccatatcacctgccttgaaggttgctggcctcatgtagccagaagcttaactgccattctgtgattggatttccagggttgggcccatccctttcagaaactctaaattcatgacttcttgccctgcctcttgtaagtgctattttgctctagtaatgagagctcttgagcctgtgtgttcatttaacctaacaccctgcagagctaaggcttgggttttcgccaactccttgtgggatggagaatccaaggaatctggcctcttggaagtgaggaaggatctgcatatgtgaacagcagtatgtgacaggatagtcaagctggggagcagatagagttgcagggcagccctctgtatgtctcctaacagcctcttctttctctaggtatgtgtacattccagtgggcgggtcccagcatggcctgctggggacactgttttccacggcgatgacatttgcatttgtgagctactggcatggcggctacgactacctctggtgctgggcagcgctcaactggctgggagtcactgtggagaatggagtccggaggctggtggagactccctgcatccaggacagtctggtgagcaggatccttgctcctgtgttaggggacagtggaactaggcagatcaggtttattagggatggggccatcagattccctgcccccactatgggccctttctactaggttggttcaaagtccatatgcctagaggcaagacagctggaaaagaagcttctgtagtgcatatatgtgtgtttgtgcatgggtgtgtgtgtgtatatataactataaaaaatgtattatgtaaaaattagaacatttaaacaagaaaataacctctcaacagaaaccatgttaagatccattcttctaaattttttccatgtgtatatacaaacagacatatgtatataacattaaaacaaatgctattacagagagatgattgtatcgggaccatctttttaagtcactgagtccatacctaaccaccctttttaatggctacatagaattcccttacgtggatatgccataatttattttagtctcctattattagtaatcatattattctaaagattttttgcaactatcaactgtattaagatgaatatcataaccaggatgaattctcgtaagtgaaatttccaggttcaaggtttttctcatctttaatgttcattatgtatattgcttattaactcttaactgccctgtagacaaaagtacactaatttgtatttctaccaatggtgcataagaatgaccttgctaatactgagtataactggaattttaaatccttgataggtattgtatatagtagtataaaaaacagctaaggtttttaagaagcagttcaactttacaggaaaatgatttggaaaatcaattaagcatttctctttacacatatattttaagtgattttaaactatgggcatagcttttatcttgcgaatgtgatatatgatatattacaatcttgtaggaaatcatcagttctgaagatgtagcaatattcctctaaccccgaaaaaagtagctaaaaagaaatgtgctggcatcagtgttcatggcaggcaatcacacacagaaaatttgaaaaatgattaatgtggctacattccacccagtgtgaataactaaagcaaatgcactttaaaaagccctgtcaaaacagaatacatttacatatgtttttataaagatagccatagtacaagtggacagttatttcaataaaaactgaaataaaccgagtagtcaaacaacacattggaggggatttaaatatgctcatgtatgtataaagataaatatttttccagccatcagcaggaaagaaatgccagtggattctaacagaaaatgttatttcagtgaaagccatggctatgtaacacacaggaaaaccaaaaaggatggtatcataaagattttaatcttcatcctcaaatctgagcattctgctccaaagcctgaaaacacagttaccacctttgaaagtcagaaggttcttttcagcccagtctgtagccctgcaacacatttctgtgctctttcatgaagcaagtaacattaaccttgaacttaatgttaagcagtgctctgtggcctttgagccatagcttatgctagtaataattttagaaatctaaaacattcgagtaacccaactgtgccatgtagcctgtgacctgttcattttggttcaaaataaatcaaggcatcaagcacacttactcacaggatgaagctcttgcttgtctaccttgctccatcacaccttgctccaggactcactcattcacctcacttgaccttccatctacaattcaggtaccttggtacatagtaatttttgatatgcatttttttggcaaaatatttgtcttatatgttgcaagtatgatgtttggcttgcatatttattgagcaagaatatatgaaacttatttttatcacctacaagcctggtaggcagttacagctatttagacgatggactccttgagtacatggccaggttcccattactctgtttatccccattgtctgagtgagcctcagtgttaaatcagtgcacaattagtgctttcatatcaggttgattctttagttcttcctccacttgcccagacatagagtcttcctccagtaccctgtttcttatgtagttccacacaacatccaaatgcacacaattttttgagtaaactatttccccacttaggttacccttcttccctctcttttcatgaatcaatttcctgttcttctgtcaaaatccaaatgaagacttactggctttgtgagttaattatgcatgcccctcacatcctcagtagtattcagagttctccagagaaacagatcaataggatgtgtgtgtattttggtagggggatagggatgacggtaaagaaatttagtatacagaattagaccatgtgattttgtaggctgagaaattcagacccaggagagctgatggtgtaagttccagtccaaaaaaaaaaaaaaaaaaaaaaaaaaggcaagagaagaccagtgtcctagctcaaagacagtcaggcttgaagacagaaaaaaatattgtgttagctttctattctattcagaacttcaacagattggatgaggcccactcacattagggagggaaatctgctttattcagtctactgattcaaatgttaatctcatccagaaacgccttcaccagaacacccatgaataatacttaagtgaatatttgggcccagtcaggtttacaaataaaattaaccatcacaccctttcttcatggtgtatatccttcatctgttttattaagatagattagcagatctctaaataacaaaaattattttttctttgtcatatcttctttacaaaaaatgtttgtgggtacatagtaggtgtttgtatttatggggtacatgagatattttgatacaggcatgcaatgtttaattatcacatgggggtaaatggggtatccatcatctcaagcatctatcctttctttgcgttacaaccaatccaattatactcttccagtcagttttaaatatgtaataattgttgactgcagtcaccttgttgtgctaccaaatactacatcttattctatatagctatatttttgtgctcattaaccatcattccccccaactacccttccaagcctctggtcatcatccttttactctctgtctccacaagttcagttgttttaatttttaactcccacaaacaagtgagaacaggtgaagtttgtcttctgtgtctggcttatttcccttaattacttccagttccatccatgttgttgcaaaagataggccctcatccttttttatggctgaataatactccattgtgtatatgtaccacattgtctttatttgtcttttgatggacactcaggttgcttccaaatcttggctattgtgaatagtactacagtaaacatgggagtgcaaatatctccttaatttaccgatttcctttcttttgagtatatcccaagccataggactgctgaatcatatgataattctgtttttagttttttgaggaacctgtgaactgttttccataccgtggtcttgtactaatttacattcccaccaacagtgtacaatgatgcccttttctccacatccttaccagctttttagataaaagccattttaactggggacagataatatcttattgtagttttgatttgaatttttctgactttagtgttgagcactttttcatatacctgtttgccattcatatgtcatctttttagaaatgtctattcagatctttgcccatttcttaatcagattattaggttttttccccgtagagttgtttgagctccttatatatcctggttattaataccttgtcagatggacagctgacagatattttctcccattctgtgggttgtctcttcactttgttgattgtttcctttactgtgcaaaaaacttttaacttgatgtgatcccatttgtctatttttgcttggttgcctgtgcctatggggtattactaaagaattatttgctaactccagtgtcctggcaagtttctccagtgttttctttcagtagtttcatattgtgagaccttaatttaagtctgtagttcattttgatttgattttttttaatatggtgagagataggggtctagtttcattcttctttatatggatatccagttttcccagcaccattttttgaagagattgtctttcccccagtgtatgttcttggcacttttgttgaaaatgagttcactgttgatgtgtggatttgttcctgggttctctattctgttccactgatctatgtgtctgtttttgcccaatactgtactattttggttactagagctttgtcgtatattttgaagttaagtaatgtgattcctccagttttgtaatttttcctcagaatagctttggttattctgtgtcttttgtggttccatataagttttaggattttttttttaaatttctgtgaagaatgtccttagtattttgatagagattgcattgaatctgtagattactttaggtaatatggatgttttaacaatattgattatttcaatccatgaacatggaatatctttccattttttgtgtcctcttcgatttctttcatcagtgttttatagttttcattgtggagatatttcacttctttggttaattcctaggtatttaattttattcatagctattataattgggattactttcttgatttctttctcttagtctggctaaaggcttgtcaattatatgcatcttttcaaaaaaccaacttttctttttttttttttattatactttaagttctagggtgcatatgcacaaggtgcaggtttgttacatatgtatacatgtgccatgttggtgtgctgcacccattaactcatcatttacattaggtatatctcctaatgctatccctccccgcttcccccaccccacgacagacatgggtgtgtgatgtttcccttcctgtatccaagtgttctcattgttcaattcccacctataagtgagaacatgcggtgtttggaaaaaaccaacttttcatttcattgatttttgtattttcattgtttcaattttatgtatttcttctctgatcttcgtttcctttgttctaattttgggtttgttttgctcttttctaattctttaaggtgcatcattaggttatttttagtttttctacctttctgatgtaggtgcctatagctataactttcctcttagtacttcttttgctatatcccatcagttttggcatgttgtgtatccattatcatttgtttcaaggagtttttcagtttcttaagttcttcattgaccctctgtcattcaggagcatattggttaatttccctgtgttcgtatagtttccagaattcctcttgttattgatttctgcttttattccattgttcagagaagatagtggatatcatttcatttttaaaaatgttttaagacttattttgtggcctaacatatggtctatccttgataaagatccatacgtggaggagaagaatgtgtattctgcagccattggtacagaaatgttctgtaaatgtcgattaggtccatttgacctgtgctgctggttaaagctgatgtttctttgttgattttctgtttggatgatctaattctgaaagtggggtgtgtaatttcttcagctgttattggggtatctctctttagctctaataatatttgctttatacatgtgggtgctccaatattggttgcatatgttatttacaactgttatatcttcttgctgaattgatccctttatcattatataatgatgatatgtagctttgtctctttttatagtttttatcttgaaatctattttgtctgatttaagtatagctgctgatgttcttttttggtttccattggcatggaatatctttttccatttctttactttcagtctatgtgtctttataggttaagtgtgtttcttgtagcccacagattatggggtcctgttttttaatctattcagccgctctgtcttttgattggacagtttagtctatttacattcaatgttattatttatacataaggacttcctcttgccattttactatttgttttctgttttatggtcttctccttctttccctcctttctgtcttttagtgaaagtgattttctctggtggtgtgttttaatttgttgctttttgtgtatctgcagtgtgttttttgatttgaaattaccacgaggcttgcaaataatcttatcacccattattttaaactgacatcttaacactaattgcataaacaaattaataagcaaagagaaaacgaataaaaactctacactttaactttgtttgcactgcttttaactttttgttgtttttgtttatgtctcattgtactatctatgtctttaaaagttgttgttgttatttgtttgtgttttagtctttctactcaatatatgagtagtttgtaggccacaattacattgttatagtattctgtgttttcctgtgtacttgatattgccaatgagttctgcaccttcagatgatttcttactccttattaacatccttttctttcagattgaagaactgccgttggcatttcttgttctggtgttgatgaaattcctcagcttgtttgtctgggcaagtctttatttctccttcgtgtttgaaggatatttttgctgaatatactattttaggataaaagtttttttccttcagcactttatgtcttgctaccctcccctgaactgtaaggtttccattgaaaaatcttctgccagatgtgttggagctgcaatgtatgttatttgtttctttgctctcattgcttttcagattcttttttttttaactaatttatttaagttttaggttacatgtgcacaacgtgcaggttttttacatatgtatacatgtgccatgttggtgtgctgcatgcattaactcatcatttagcattaggtatatctcctaatgctattcctccccactccccccaccccacaacaggccccagtgtgtgatgttccccttcctgtgtccaagtgttctcattgttcaattcccacctatgagtgagaacaagcggtgtgtggttttttgtccttgtgatggtttgctgagaatgatggtttccagcttcatccatgtccctacaaaggacatgaactcatcattttttatggctgcatagtattccatggtgtatatgtgccacattttcctaatccagtctatcattgttggacatttgggttggttccaagtctttgctattgtgaatagtgccgcaataaacatacatgtgcatctgtctttattgcagcatgacttataatcctttgggtatatacccagtaatgggatggctgggtcaaatggtatttctagttctggatccctgaggagtcgccacactgacttccacaatggttgaactagtttacagtcccaccatcagtgtaaaagtgttcctatttctccacatcctctccaccacctgttgtttcctggctttttaatgattgccattctaactggtgtgagatggtatctcattgtggttttgatttgcgtttctctgatggccagtgatgatgagcattttttcatgtgtcttttggctgcataaatgtcttcttttgagaagtgtctattcatatccttcgcccactttttgatggggttgtttgtttttttttcttgtaaatttgtttgagttctttgtagattctggatactagccctttgtcagatgagtagattgcaaaaattttctcccattctgtaggttgcctgatcactctgatggtagtttcttttgctgtgcagaagctcttgagtttaattagatcccatttgtcaattttggcttttgttgccattgcttttggtgttttagacatgaagtccttgcccatgcctatgtcctgaatggtattgcctaggtttttcttctagggtttttatggttttagatctaacatttaagtctttaatccatcttgaattaatgtttctataaggtgtaaggaagggatccagtttcagctttctacatatggctagccagttttcccagcaccatttattaaacagggaatcctttccccatttcttgttcagattcttaattaatacttgactttgggagtttggttatcttgaggtagtcttatgtgggttaaatctatttgatgttcagtaaccttcctgtacttgaatactgatatcgttctctagtttggggaagttctctgatattatctctttggagaaatgttctacccctgtcttttcctttctttacctcccttttaaggccagtaactcttagatttgccttttcgaggctattttctagatcttataggcatgcttcattctcttatattctatctcttctgactatattttcatatagctcatcttcaagtgtgctaattctttcttctgcttgatcagttctgctaagagactctgaggcattcttcagtatgtcagttgcatttttcatcttcagaattcctgcttgattctttttaattatttcagtgtctgttaaatttatctgatagtagtttgaattccttctctgttttgtcttgaacttcatttagtttcctcaaagtagctattttgaattctctgcctgaaaggtcacatatctttgtgtctcagtgatttactcctggtgccttctttagttcgttcactgaggtcatattttcatggatggttgtcatgcttgtggatggtgcattggtatttggccattgaagagttaggtatttattgtagtcttcacagtttgggcttctttgtgcctatccttcttgggaaggctttccaggtatttgaagggacttgggcattgtgatctaagttttcggttgctctaactgtatttgcattacggggcaccccatgtccagtaatactgtgggtcttgcagactcatagaagtactatcttggttatcttagagaagatccagaagaattatctggattgtcaggtaaagactcttgttctcttcccttactttctcccagacaaatggagtctgtgtgctaaactgcctagagctggaggtggagtgacacaaaaactcctgtgggccaccactactgggactgcactgggtcagacctgaagctagcacagtactgggtcttgcccatgacctacaataactactgcctggctaccacctatgtttgctcaaggccctagcgttctataatcagcaggtggcaaaggcagccagacttgtatccttcccttcagggttatgggttcctcctggtcctgggtgggtcctaagatgccatccaggagccaggtcctggagtcagaaaccttaggaatctacttggtacattattctactacagctgagctggcacccaggctgcaatacaaagtccctgccactcttccttctcctttccacaagcagaggagtcttctcccttggctaccaccaccccaggcttgtggcaagtactgcttggctattgccagtgttcattcagggtccaagggctcttcattcagcttgtgatgaatgctgccaagcctgggtccttcctttcaggacagtaggctcccttctagtccaagacaggtacagaaatgtctgagccaaaacctggaactggggaccccaagagcctactcggtgctctactccactgtgggtgagctgataccttggctgcaaaacaaagtcctctttcctcttccctcttcttttttcaagcagaaggagttccccatagctaccacaacagggaatgtgctatgtcatgcctgaagccagcaagtctctgagtcataccaaaagcccacagcaagcactgcctggctaccactgttgattattcagggcctaagggctcttttgtcaacaggtgatttattttgtcaggactgcatccttcccttcaaagcagtgggttcccttttggcccagggtgtgtctagaaatgtctgggaggtaggggttgggatgggggcctcaaaactctgcctggccccctatcttactgtggctgagcacgtatccaaattgcaagacaaagttgtctttactcttctgtctcctcttctcaagcagaagtttggaaggaatctgtcttggagctgtgagctatgctgcctggggttgggggacgggtgatgcaagcactcccttggatgctctggctggtgactcactaggtcacgtgtccccaaaatcaactggcttgaagttgagcaaagtatgaggacttgctcaggaattagtccttgttgcctggactgcctttcaagtttatttatgaccttagagccccttagcccttggggacaagtgttgctggaatctaagttctgaccactggaatggatgcttcccctctgactagggctgttctaagtgtcccctccacaggcactgggctgagttctgcccatctttctgctgtgacagggcagccctgagttccagtgccaagtcccacagtcactgtgatctttctcccccaagtgtacaagttgtcactccccgtggctgctgttggaggatggaggagaggtggcattgcaatttaagactgtctttcctaccctctacagagccactttcagtgatacaaagttaaaaccaggtactgtgatgctcatccaatttttggttcttataaaggtgagtttttatgtgtagctagttatttaattgggtgttcctgcagagagaatgattggtgaaggcttctatttggccatcttgcttcacctcccacttctttcatatctccatcttcaaccccaaggccttatttggggatcaaaatatagaagaattctatttcttggtgttggtagactgagagctgaacgttcacgcaaatacttgtcagagctgagtgctgtaaataggaagccctctgatcgtctacaacagggttgtctgatagaactcctgtggtgacagaaatgttaattgcactgtccagtacagtagctactagccccactgagcacttgaaatgtggctagtgcctatttaaactctggattttaaatatatttaattttaactaatttagatcccagtatctcccatatggctaatggctaacattttaaacagtgcagctctagaacatacccccacttctagaaaacattaaaggttaaaggcatatagtgtgtctgaccctgctgttacttggaatgatcttcattaatgcccttggcacctcatatatacaactggctgctgaacctcttgacttggaaatctaccaggtttctcagactttgcacgtgtaatatggagctcgtgaccccctgcctcccagtaattccagcatactctctttccccaaatgacaccaccatctatctagctactcaaggctaaagccattatgttatcctttgtacctctctccccctcagattgatctgcatatactgtacattctacctgctaagtagatctcgaatttttttgtttgtttctatttctactgaaatcctaatccaagctgctctcatttctttcctggtctaccaaatagcttctaggtaatcccttgcttccacttcctcccccttccatttattatcctcatagtcctgagtgatatttctccataaaaacctaaccatgttgctgtcttttaaatcctatagtgactcccattgtcttagaaccaggtccacaacatttaagatgacctatgacaccctatctgatctttcacttactgcctcttcccactcctcccccctcacctctctgttcttctttctgttcattacatacctgatccctctagcctcagctccccaacacaggtacttccatctcctaggatgctctctttccttcccctccacccctattcatccttcagatttcagctcaaatgatatctagtttggaaacccttcactggccctcctaactcaattagatcccatttgataatttattttgggtaccttgtatatgttctcttctgctatatttatcacagttgaaatgaaatttttgacataatttattccctcgctgaactgtaagcctcataaggtcagaaatactgtattcttgacccttatcccaattcctggcacagtgcctttttgaataaaagaaagaatgaatgatattttctgacttcactcactgagggagtttaagatgaaatagacttaggcagcaacatgaagaatatagattgaatactgaaaaaaactaaaactgagagttattgagtattgggggactatcttactaagcagcagcatagatacaaataggtctagtgatggcaaaatgctgttataatgctcagtgcacaaaatacatatacaggaaagaatggggtaaggaggaattagtcttcctggtagcctgctgctttatgagaggagggattgttggttgtgactcactgaggcacagagctgtaggaagctaacaaaaggcattttcacaaagcacccaagctgggtggacgtagaggagttactgctggagcactgtgctttttctctgtacaagtactctccagggagtgaggatttctgtttagcattgaaatattttaatcagaggaaacattttgaagtgacaccacttcatgccaattctcagtttgatctctcctttgaaggaaggctccttcaggctgcttgtcgattattcctacccaaagaagagtctatatctcaaatagttcacctactcccacccctgatttccatttcattgaataatttaaatacgttctcctctcccagcctggcctccgcctctttgccccaagagtgtcctgctgagctgatttatatcctttctgaagcagtaaaatttctatttatacacttaattgaggaaacatgcctccagtgaaaaccaccgagaatcagtctgatggtcatggcagggatttgatgttctggggcatcagagagaacccaaagactctgtggtggtggtaattcaatgtattggccatgttgattagtttgattttgaagatagagaattccaaattgggtttaagaaatcaaccaatttaaaagtattgttgattgtaaattgatcaacgtgatccaaactatggttatttgattctatggaatcctaactcaccgcttggcaagacatacatatctagttggcctgattagaaaacctttttgctaggggtcagtagtccaagccccaactaagcctctgagggagtataaagcaaatttgagaagagctgtggcatttggtaatggctcatggccttctattcctcctccatttggatttctttcaacaaattgaaatcaagcacttactggacataagccattttctccagaaaatggtaccctttctcgacagagcccacttaggcatagtcaacgtggctattcatttcttaacttactcatttaggaaaaaaattctcagcaccttatgtagaagacactttgcacattactgaaggactctaaactgaataagacatgatccctgccatgaatgaaggtgtcttgcctggcctcctatcagagtactcatattatgatgactgctttggattaaagacataataaaaccatgaaatgggagcttctctctatgaagagctaagagatctataagacaaatgaacttgcctttataaacataataaaatactgattgacctagtcttcccaggcattgcttagaagaaaggcccaggctagagatagaaatttgggaccatatagatgatattttggagccatgagaatatttgagactcagagagagagagagagagagagagagagtatgtgtgtgagagtgtgtgtgtgtgtgtgtgtgtatgtgtgcacacacgcatgcaaagagaagaaaaggcagccaaggaacaccaatattgagaagttggatcgagggggagctgaggaggaggaaaatctagagggtgatttcacagaaaccaagaagaggggagatttcatggagaggaagtggtccacggtggtgatgctgctcaggggtcgagtaaaatgagagtgctggcagtgagaaaagaaagctgtgagagttcatccctgcccactaggggcttatgatccagatggagaggtgagatgtgcacagaccagttgaggaccactgtaaagcattacgtgcgagtggccagaatgaggcacagaggcccctgatgttcatggtggtcagtgtgagctaagcttttgggaaaggttcattaaagagccaaggcttgaatagcacactggagaatcaacagtaggatttggctagggtcaggagggagaagaagactagcattgcaggctgggagaacagtgcgtgcgctacctgaagtcaggcatgggcattctgtatccaggtcacgaggctgccaagacaaatggaagaagggcggttagagaggccacatggttcccatagaaagggatttgaatgccatgcttagaaatttaggaacagaaaccacttaaccaaacaggagagcgttaaattaacatattaatcccacacatcaaattagcctgttgtgccagcttattagtgctcacccgggcctctgggtctggaaaaaagcaatgcgtgttgttatgaacggtgtgttccttggtggattacgacccattggcacccccacagcattgtctcccactcctaaggatcattagcaatgcaggaaacacactatgcaattcgctggttacacattttcttctctgtgggaattggaagcctgaatcttaacctctctggtctaagaggtagaattctgaaaataattccatgttagttcaaatatgtttagtatggcgaaagcattttcaagggttctttttaactttccatgactgagtcggctatctgacagatagaaggctttgaaatagaacccattttcagttattcctggactgatgagcgccaggactggccagtgcttggccttctgctgcctttgctcggctgctcagtttcttctggagtaagacgggtgtcctgctccaatcatcggctgctatcatggcattcttataccttctccctgcttaatgcaaactctcacctgagaaaccataatctcaggaacgagtactgagccaaagatgagatccatagtgtgaatgtaaatggttgaaactggcttttctcggtggtttgtggagtttgattctttatctgtgagtctctggtctctgtttctgcagcacagatgaatggtggttgctctaatctcagtctagtgcctagcagctttccatagatgaacttgggaaaaataaataatcttagtatgtatatgttgaagatttggctgtgtctttccaattctgggtatctttttctcccctaaatccaaattacccactggaggtgacaaagcttgaatttccagtgttcctgttactgatggaaagaaaaatagcccccttgtttcttcctaaaataatatgcacatactcactgcaatatatttttacaatgtgtatttatatatgtacatatgctgtgactatatgtgtgcaacgtgtgtgtgtgcatgcctatgtactgatttttaaagatctaaggcagagatgtgcaggacttccaaaataaaattcttctaaagtatctcacattccttccaagacctagaaataaactctgctttaaaaagcctttcgagcagctgctggccttgttagagataagctgggttggtatcaatatacttgtgattactgacatgtattgaaacacaatttaagttggatcttgctttttcttctggtgtcaaacttgtagtttacctaataggctggagtaattgctggaacagacactgactgtctgcggaagggtgggaagcaagggtataatataaaaggtgaagttcatccatcaaactgactgcagctattaacagtgatgttaagatagtttttttgttttgttttgttttgttttgagacagagtctcactagcctggagtgcagtggtgcaatctaggctcactgcaacctccacctcccaggttcaagtgaagcttctgcttcagcctctcgagtagttgggactacaggtgcatgccaccaagcccagctatttttttttttttttgtatttttagtagagacagggtttcaccatgttagccaggatggtctcgatctcctgacctcatgacctgcccacttcggcctcccaaagtgctgggattacaggcctgagtcactgcgcccagcctaaaatagttttattgagagggaatatgttcttgacatattagttttaaatgatcaccaaagaatgatagatttaataaaaccttattttatttaaaaatacacatacacagaaaagtatgtgaaaggttatatactaaaataattgtggtggttaactcttactggtggtattatttgtgatacatagtctcttatttttgcttatttatattttcaacttttgctacagtaaatgtatactgttgtctaactaaaaattattgagagagaggtgagcaggacggattcaccctagggaggttttgattagctgatcctggatgcttgatttatgttaaaaattgaaagttagatgtagtggctcatacctataatcccaacactttgaggggccaaggtgggagaatcctttgaggccaggagttcgacaccagcctgggaaacacagtgagacctccttgctacaaaaacaaataaaaatcagcctgttgtgatagcatgtgcctgtagtcccagctactcaggagactgaggcagaagatcgcttgaggccaggagttctgtgctatagcacgctgtgattgtacttggcaaatagctactgtgctccagcctgggcaagactcaacaacaacaacaacaacaacaacaacaaagaaattgaaagatagaggtgtcattctccagaacaaactagggctgttgtagttgccaccctttgccaaagaggaaatggtaccagatactgtacaagaatctttcacatttgttatttgatgtaaccactgtagcaaacctccagggtaggtgttactacctccagtgttacagatgttacagatagggaaactggagactggggaaggtaaataatttatctcagaacacagttagttaaatgagggagggagtcaaacccagttatacatgatctaagcttcctggatttcagactagaagaatcttctttttgataaacccctcctacttagatcaccccattcacttcatgtctctttgctgcttatgcatactgggcattggattgattaatattccagccctcagtacttggacaacatgggtttcgattgtgtctcctctcaacctgtttattaaataactactctgaaaaattggtccgactaaaaagggaatgttcacagaaggaattttaccacattatctcatgtgatgttaacagtagccttataggcgtgtattatcattattcccattttaccaggagaaaaactgaaacctgaaagtttaagtaagatacgtccatggctcacacatcaagtatgaatgcaataagtaaataaataagcaaacaagcagcctccattcatcccattcttgggtccctttccccagcaacagtaatgttcagttctcttagttgtttgtgatttttacttctttccaaagtgtacactaattttattaatttcttcatttatgtttttttttttccttttttgaggcagagttttgctcttgttgcccaggctggagtgcagtggcttgatcttggctcactgcaacctccacctcccgggttcaagcgattctcctgcctcagcctcctgagtagctgggactacaggtatgtgccaccacacctggctaatttttttttatttttagtagagatggaatttcactatgttggccaggctggtctggaactcctgacctcaggtcaggtccatctgccttggcctcccaaagtgctggtattacaggcatgagccaccacacccagcctatttcttcatttatgaattgtaactattaactgctttcttcatgaaatgttagcatcttagacctactccctatttttcctcctaatataataacttcatttttttttgttaattcagcactcagcacaccatggtaagtgtggctcactgccaaactgtttaatataagtacatttcctttcttacacaactgtttcctccacttaagtgaagaattgccttgccatttttttctttcattagtttactgtccctccttcttcccagattctccaatagaactagaaaatccctcagatagaattttccacatggtcagaggtatctgctcatctgtctattctcttcctttcctggagaatctctcttgaagcccttccatcctcttttcctacctgactcactgctctttagatgctctgtttagctgctgcactgatgcttcccttctcctctctcctttaacaaatccctgtttctttgtgctgggtcttgttttttctttttctcccttgatttggtggaggacatcctttagtagctttttaagaaaaaggccataggagatagttttttgagatcttgtattttcaaaaatgtcttatttttactctcacacttgattgattaggcactggatctcaggttgaaaagtaatttgtcctaagaattttgaagatattatctgtcttttagcttttagcttttctgttgagaaatgccattttcattattgtatgcattctgttttttgctctggaagcattactgcgaacatcttcggtatatatctaaaattttactgtgcccattgtccctgcctttaaattctctttgatgcagtttatctgtgaaagaacttttatcctgggggtgaagaaggaagagggaaacctcgtgctctatatgtttattacccagatttttaactaatcttcctgtttttttcttcttcatgggttactcttgctatctgtgctacctggtgcctctatgcctgggccttatgggtatttggtgtataaatggctttcatctcttcagcatctagtatttgggtatctcaaatctgctaattctttaatctgctctatcttattaaaatgggttgactttgctcaccctgctcttcattttttatctgtgaatgtgtatccttttcaaatgtttacttgcattttaatgagtcttgtgaaggcatcagagatgtttatgttaattggatatcgctagaggagttttgtttcctatcacttggtgaatcattcttagattttaaaatattaaggttacttaaaaaggaggccttgctttaagctgttgtttttgtggttgaacagaatatagctgaggccacagctgtcacatcctaggcttattcagtagtcccaagggatctaagtgtagcctggagagggaggcccccagtaccatgagcagctatcacttgggtgtgatggtcgacagactttcatcttcccacccatgtgccttgactctttatgctcaagggagatggccagggtctaaggtcatttagtggaaagattcctaggttttcttttctttttttttttccccgttacttctttttaacttaatgaagtcattcacgaccatatgccttaaaaaaaatagagagagagagatgaggctgaaagtcctctgggatacccaccccctaacaaccacaccctgctcattttcctccccaagaggtaaccattattatcagttcgaatgtagtctcccatacctttgctgctttgtgtttgtgtggtttaagaaacattctaaaatttgcacttcttttcaccctcactgatatgttgtgaagatgatcctatgatagtatatgcagatctgtgtaatcaggaatgatatggatggtatggatatataatttagccattctcctgttgaaaattcaggttgcttctatttttttctcttgcaaataatgcatctgcagtgaagactccatttcgagattccttgtacatgtgtgtacgtggttctttagggcagttaccaagaacaaaataggatagaggagttggcaaactaaggtccatgagccagatttggtcaactgattgtttttgtatggcctgcagttatgaatcatttttacattttaaaattgtattattgaatactctgtgctttcctcagttatttaaaagatcacctttaatatatagtaagtatcaaaatagacttggattcattttttggctgtctattctgttgcgttgatctagttgattattccagttttaaatactagagttttaaattgtgtcctgatttctgctagggaaagcccctaccttttctggcattttttcagaattgcattggctagttttgcctgttgactcttctgtctgaatcttagaactggtgaagttccccaaaactctgtttggtattattattggaattttttagatgtgcatttaattgtagtatgatttgagtagagttaacattgtcttagtccatttgtgctgctgtaatgaaatacctgagacagggtaatttatgaagaacagaaatttatttcctagagtcctggaggctgggagtcaaagatcaagacactggccatttaagtgtctggtgagggcccagtctctccctccaagatggcatcttgttgctgcatcctccagaggggacaaaactgaattgactcacagttcaacatggcttgggaggcctcaggaaacttacaatcatggcggaaggcgaaggggatgcaaggcaccttcttcacaaggctaaaagaggaagtgccaagcgaagggggaagagccccttataaaaccatcagagctcatgaaaatccactatcatgtgagcagcatgggggaaactagccccatgactcaatgacctccacctggtctcttctttgacacgtggtgattatggggattacaattcaagatgagatttgtgtggggacacaaagcctaacaatatcactatggttgtgctttttcaaactttctgctccttttattcaaaatttaggtaatttatattttctagataatttacatttttaagctatgtctgcaaatatattgttatataatctccaaagatttaaaatttttctatatatcttcttatttattttgcctaattttcttaattgataaaaattgctaaagtttactcattttatttttccttaaataaaaacttttggtttaaatgagtgaaattttaaaaaatgtaatggtgtgttaattcttgcaaattgttgatattcattattttattgcagtgttatcagtgagcatagtttttatggtaactttttttctttattttttcaacttttaagtttaggggtacatgtgcaggatgtgcagatttattatataggtagatgtgtgccatggtggtatgctgcacagatcatctcatctcctaggtattaagcccagcatccattagctgttcttcctgatgctttccctctccctagcccctcaacaggccccaatgtgtgttgttccccaccatgggtccatgtgttctcatcattcagctcccacttataagtgagaacatgcggtgcttggttttctgttcctgcattagtttgctgaggataatggctttcaactccatccatgtcccttcaaaggatgtgatcttatttcttttttgggctacatagtatttcatggtgtatatataccacatttttctttgtccaatctatcattgatgggcgtttagattgactccatgtctttgctattgtgaatagtgctgcaatgaacatacgtgtgcaagtatctttataatagaatgatttatattcccttgggtatatacccagtaatgggattcctgggccaaatggtatttctgcttctaggtctttgaggaattgccacagtgtcttccacaatggttgagttaacttacactcccaccaacagtgtaaaagtgttttgttttgttttgttttctctgccaccttggcagcatctgttcttttgacttttttataattgccattctgactggcatgagatgctatctcattgtggttttgatttgcatttctctaatgatcagtgatgttgagctttttaaaaatatgttggccacatgtgtgtcttcttttgagaagtgtctttcatgtcctttccctactttttaatggggttgcttgtttctctcttgtagatttatttaagttccttatagatgctgaatagtagacctttgtcatatggatagattgcaaatatttactcacattctgtaagttgtctgttcactctgatagtttattttgctatgcagaagctctttagtttaattagatgccatttgtcaatttttgctttcgttgcaattgcttttggggattttgtcatgaaatctttgcctgtgcctatgtcctgaatagtattgcctagattttcttctagggtttttatattttggattttatatttaagtctttaatccatcttgaattaattttttatatggtataaggaagaggtccagtttcaattttctgcatatggctagccagttctcccagcaccattttttaaatagggaattgtttccccattgcttgtttttgtcaggtttgttggagatcagacgattataggtatgcagtctcatttctgggttctctattctgttctatcagtctatgtgtctgttcttgtaccagacacatagttttggttattgtagccttgtactatagtttgaagtcaggtagcctgatgcctccagacttgttctttttgcttaggacttgccttggctatttgggctcttttttggttccatatgaattttaaaatagttttttctaattctgtgaatgatgtcaatgatagtttaatgggaataacactgaatctatgaattactttgggcagtatggccattttcacgatattgattattcctatccatgagcatggaatgttcttccacttgtgtcctcactgatttatttgagcagtagtttgtagttctccttgaagaggtccttcacttcccttgttagctgtattcctaggtatttttttctttttgtagcaatcgttagtgggagttaattcatgatttagccctctgcttgcctgttgttggtgtataggaatgctagggatttttgcacatgatttttatatgctgagactttgctgaagttgcttatcagcttaagtagcttttgggctgagatgatggggttttctaaagataggatcatgtcatctccaaagataatttgacttcctctcttcctatttgaatgcgctttatttatttctcttgcctgattgccctggccagagctaccaatactatgttgaataggaatggtgagagagagcatccttgtctagtgctggttttcaagaggaacagtttctgcttttgcccatttagtatgatgttggctatgggtttgtcatatatcactcttatattttgaggtatgtttcttcaatacctagtttattgagagtttttaacaaggagggatgttgaattttctcgaaggccttttctgcatctattgtgataatcatgtggttttttgtctttagttctgtttatgtgatgaatcacctttattgatttgcgtatgtggaaccaactttgcatcccagggatgaagccaacttgattgtggtgcataagctttttgatgtgctgctggatttggtttgctggtattttattgaggatttttacatcaatgttcatcaaggatattgacctgaagtgttctttttttgttgtatctctgccatgttttgacatcaggatgacgctggccttcatgatagcttcttagaatgtatttaggctcctttcctggtttaatacatgttgagtttgattatggcccacctgcgtttgaaaactgcatgtattcactcttccatgtatctattggtaaaggcctgttaatgttttcattgtgataaagtatacttaacatataatttgccattttaaccacatttgggtatacaattaaggggtattaaaaacattcgtattgttttacaaccatcaccaccctcaatctccagaactttttcatcatcctaatctgaaacctctcatcctctcctctctcagtccctagtagccactattctactttctgtctctatatatttgactgttttaggtatcttatataaatgcaaccatacaatgtttgtccctttgtgtctggcttatttcacttagcataatgtcttcagagttcattcatgttgtggcatacatcaaaacttcttgcctttttaaggctaaaatgccattttatgtatatattactctgtttactcactcatccattgatagacatttgggttgcttccaccttttgcctattgtgaataatactgctgtgtacactggtgtacaaatatatgtttgagtccctttcagttcttttttgtatatacctagaaatgaaattgctggatcatatggcaattttgtgtttaattttttgagaaacctatataccgttttccacagtggctctaccattttacattctcaccagcaatacatagggcttaagatttcttcatgtcctcatcaacacgtgttattttgtttttgatatagccaccttagaaggtgtgaagtgatatctcatggttttgatttgcatttcctttatgacttttttgtgcttactggccatttgtatatcttctttggataaatgtctattcaaattctttgtccatttttaaagttggatttttttggttgttgtgttataggagttcttgatatattctggatattaagctcttatcaatatgtgattgcagatcttttctcccattcctgggttgtctttttactctgttaatagtatcatttgatgaataaaagttaatttggtaaggtcaagtttatctctttttacttttgttgatggtgctttttgtgtcatagccaagaaatcattgctaaatccaatgtcatgaaggtctccccctgttttcttttaagagttttatagttttagttcttctttttagatacttgaacccttttgagttaatttttgtgtatggtataagggtccagtttcgttcttttgcatgtgtatatccaggttttccagaaccatttgttggaaagactgttctttcctcattaaatgctctttctgcccttgttgagaatcatttggccttgttgaaaactatttaaccgtatataagggtttatttctggtctctctattctattccattggtctatatgtttatctttatgtcagtaccacacagttttgattattgtagctttaagtgttaaaatcaggaagtttgtgtcctgcaactttgttctgccttttcaaggttgttttggccagttggggccatttgagatctcaggtgaattttaggatggggttttctatttttccaaagaatgtcattgggattttgatagggattatactggatctgtggatcactttgggtagtattgttattttaacaatattcttcccaactgggtgcagtggctcatgcctataattccagcactttgtgaggctgaggtgggaggatcacttgagcccaggagtttgagacctgcctgggcagcatagtgagactttgactctacaaaaaaaagcaaacaattagccaattgcaattagccacacctgtggtcccagcttcttaggaggctgaggtgggaggattgcttgagcccaggaagtttaagctgcagtgagtcatgattgtgctactgcactccagcctggagacagagtgagaccctgcctcaaaaaaaaaaaaaaaaaaaaaaaaattcctcccatctatgaacgtgggatatctttgtatttatgtcttctttcagcattgttttgtagtttcattatacaaattttttgcctccctagttaagtttattcctaagtattttattctttttgatgccattataaatagaattgctttcttaatttccttttcaggttgctcattgttagtacatagagatacacaactgtttttttgcacattgatttttgtatcctgcaactttgctgaatttgtttaaatttttggtagaatttttagggttttgtacatgtaatctgtgaacagaaatcattttacttctttctttctcatttggatgctcgttctattgttttcctttaaaaaattttttaaatatatatttattatactttacattctaggatacatgtgcacaatgtgcaggtttgttacatatgtatacatgtgccatgttggtgtgctgcacccattaactcatcatttacattaggtatatctcctaatgctatccctctcccctccccccacctcacaacaggccctagtgtgtgatgttccctttcctgtgtccaagtgttctcattgttcaattcccacctatgagtgagaacatgcggtgtttggttttttgtccttgtgatagtttgctgagaatgatggtttccagcttcatccatgtccctacaaaggacatgaactcatcattttttatggctgcatagtattccatggtgtatatgtgccacattttcttaatccagcctatcattgttggacatttgggttggttccaagtctttgctattgtgagtagtgccgcaataaacatacgtgtgcatgtgtctttatagcagcatgatttatattcctttgggtatatgcctagtaatgggatggctgggtcaaatggtatttccagttctagatccctgaggaatcaccacactgtcttccacaatggttgaactagtttagagtcccaccaacagtgtaatagtgttcctatttctccacatcctgtccagcacctattgtttcctgactttttaatgatcgccattctaactggtgtgagatgatatctcattgtggttttcatttgcatttctctgatggccagtgacgatgagcattttttcctgtgccttttggctgcattaaatgtctccttttgagaagtgtctgttcatatccttcacccactttttgatggggttgtttttttcttgtaaatttgtttgagttcttgtaaatttaaggacttctctgcattggttattctagttagccattcgtctaatcttttttcaatgtttttaacttctttgcgatgggttcgaacttcctcctttagctcggagaagtttgatcgtctgaagccttcttctctcaactcatcaaattcattctccgtccagctttgttccattgctggtgaggagctgcattcctttgaaggaggagaggcactctgatttttagaattttcagttttttgttctgttttttccccatctttgtggttttatttacctttggtctttgacgttggtgacgtacagatggggttttggtgtggatgtcctttctgtttgttagttttccttctaacagtcaggaccctcagctgcaggtctgttggagtttgctggaggtccactccagaccctgtttgcctaggtatcagcagtggaggctgcagagcagcgaatattgctgaacagcaaatgttgctgcctgatcgttcctctggaggtttcgtctcagaggggtacctggtcgtgtgaggtgtcagtctgcccctactggggggtgcctcccagttaggctactcgggggtcagggacccacttgaggaggcagtctgtctgttctcagatctcaagctgcgtgctgggagaaccactactctcttcaaagctcagttggaaatgcagaaatcacccatcttctgctatactcacgctgggagctgtagactggagctgttcctattcggccatcttggaactgccccccactttaaaaatttttaaatgacacacaaagatgtattgggcaaaacatattttgaaatgtgtatacctgtggaatggcttaattaagcaaattaacatgcactacctcacttattttctgtggtgacaacacttaaaatctactctcttagtgattttcaagaatatgacatatcgttattaactatatagtcactgtgttgtacaatagattacttcaacttattcctcctatctaattgaaattttgaatcctttgaccagccaacatctctccaacacccccttttcccccagggcctattaatttttatgcagatattttatattttttattttgctctgttagatgtcattttctggggagatttgctaaatctcctactatacttgtggatcccagttacttttaaaaattccagtgtcactgtaagccatatgttcttgaagacatatggcatttgaaatcgacagttggtatctgccaaccattgttagtgggatacatgcacgacatatttgttgaacaaacatttcttgaaaatccactttgtgtatggcactcaagaggcaaagatcttgaaggttgcagttgagagaagggaatccgcactgccacacaaatatgaagttgtgtaatgtagtaggagcatgaagatattcaattagagaaacgtatgtgaattcttgcactgcacttatcggtatataattcaggtaagttacttaatctctctgctcttctagttcttcatttgtaaaatatgaatagtttttacctactttacagtataagtaaagctgctcacacagtgaattttttgcatcacaagctgtatttatctaaaacatagattgatattgtctagcccatgggttatagaaacacagaaattgggtgactgactttgctaggattgggatgatctacatttatcaaatgccaattgtgaattaggtaaatgaagagcctcagcatgtgctgggcaacacaggtagaagatggaaatatagaacctaaacctaagttgggctggtccaaagctgttgctctcctgagctgacattaagctggggcttgaagaataaggaagatgcattcaaagtagagagaacagcttttgctaagtcacagaaatatggaagcccatgttatgtttggggaacactgaagacagccatgtcattgataaaaagtggtgagagttaagattaggaaataaaatgggatccagtttaaaatgccttcctattttggatttcagtctctaagcagtgaagaaatatcaaagcattttgcagagtagaggcacataatgtgcttgatgaagtagagagaggaaggctagagtatgaccagtcagttgaaattgaggcttctggaaaacttgaagcagagatatgcagactggaggtggagccatggcagtggaaaagtaagaactcagggtgaggcggtactattgctcaatctggaacttttagcaggaacccaggcaccccaaacatggcttaagttctctaactagacagagccagttgtttccttagttatttgaaagtactctgaaattcttgcatgtactgcatggatttaaatgctaaactttggcctctgcagtttttaaactaagctggacatctaaactatgaggaaggtaacttgtccaattaaacaaatctggctttgccttcattgctgcaggtatttgattctctctcaggagtatgcacacagagttcggaaaatataactgcattgacctgatgttgtttgaagctctgtacacttgaaggaaggaggaggtattgctttcaaaggctcttcatgtattcattcagcttggatataaggtgggatagaacattaaggaactcaggagattctgtaacttatttagggcaaagagcgagatgggtgatagctaatcattgagcacacataggatatgcgtggttcttggatgctgtgtagttgagaaacggtcctgccctatccttgaggaacctactatgctggtaggaacatgaaagaggggaaactggtgaaacacagacttctagctgaaaatgactgaatattttgagaaggggaaacatgtcctacaggttggcacagagatgggacatgggccttggaatgactttggaatctgagtcctcctgactttcagtgtgtcactgtggccgttcttctctttcttgagagttataattgtgtctcttgttgtccctggcctcatctttacagtctgtggggtgttcacccctcatttgctctctctggtgtccaccaacccctcccttgccattgcctttttcatcctctcttaccctctggttagcatttttattagaaaatggaaaacttcagtgattatatggaagaactgtgtccagctgctcaaacccacccagtttctgtttttagcttctccaccacttaaaaataagcagcatcaggtcccacttgccaagcctttgtcacagtctccagcagccattcctccggccatctgctcctccagatgctcagcctgtccccacctcccgtctcagccccacatgcagcccctctgtggatgagtgaggggctggcaagcccacagcctccagcccgactgtgtcatctgcctcccttccccatgtatgtttctagttttgttttgacccacgttcctgcagccccccatccccggcttgtttgctcccaccaatcctgtgatttccagggaaaggatgctgcctggaaaagagggatgagttgccatggagatttgaatatacacaggaagccatggacacctcacacctggaagtacaaacgagtttgacgtaagtttagtttagccctaaggtttagttggtttgggttgcagtccttccctttggaagtcagtgtcttagacggaagtttaaagccaagtgttgccatagctgagtgttgtcgtgacattcctccatctcatcttagtctcttggatcacaggcaaactactcagaggaattggaggtctgccctaggccagtgttctgaggggcttgctgtaaccaggccaaaagtctagcacctgcccttgcacctgaagagtgggtatattcacattcacagggagagaaactgccccgacccaccccctgtcatgtaccgtagagaccatgtggacaactggtcacccctgcctgagaacaaagtgattctaatgagccccacctcccattcttcctctttcttctggatttcaggagtgtcaggggaggaagcttggaattggcggctacaccttgcctgtctgtggccgggggcacaggaggctcctcctcactctccatgtgatgacacatggtgggcaggataggaggggcctggtggttgaatactgtgaaggaacattccctgccctgggatgcatttctctgggtctcagaggaaagggggtgcatttttggcattactcctaatgcccccatagaccaagcaagaaccctgctctgtgatgaatgtaggggagaacaattcgccctttctcaacagggctctgctgaccttttgggcaggacggctccgtcctgcacattgccgtgcgcttattatccctggcccctgcccaccaaatgccacattgccttgtagtcattgagacaaccaaacatgcccagcaacttttcaaacatctcctgggggatagtgccactctcatttttttgctgccaggaaatcagattgctacagactaatcaacactctgagaagagaccgggaccagaccagagctctcttttatcctgataaattcctattaatgaaaatcaaattctatttgtccattattgccttagctgatgaacttggcaactctctttgtcatacctgatggcttttcactgtcttctggtattcccccatttcgtttataattcttcaacatgaattctcttgtcaagggagttttcaagtatctaagccatgaggatggtgacttaacacatgaggcatgcctcccactcgtgaggcttgcatcccggtgatgaaggaccacaggggtaatcgctgtaggactatggaaaggagagtgtaagagaaaaagcctttaaagtggaggctttggccctgtggccctagagattccgaaagttagatttattgatgtagctggctggtcaaagggaatataccctctaattttgtccatatgacctgtttcctcctgggaacttaccccgagagctcctataaaccagtagctgagccaggaggttcccaaggtggagagagagatccctgatgtcaaaaccatcaccttccaaaatgtccagagaatgcaaagaggagagatggattgcagctgagactcctgtcccctttgctgttagttattaccctcttgtggatgaacctgacagatcccacccccttttcctttcctgtagcccatcattctttttccccactgtttcactgtgaaaatgaacaatgctctgttcattttgctgcttattggcatggctagttttgtcagaggatgaggctgttggttaaaattaggtttttggattccttgatcatcatctattttgtctcctacccactcaccctgggggataatcaagaattgcctatgggcatcttgatttctcctttaaatccttttagtttgattctaacaggctgtgctttaacattcttgcttatttaaatttttttttaatttctaaatttttaaaaaacatttataaaattgaattgtagtcattcatttcagattttagttgccccccctctccttcctatctctgagatcagcagctccttcacagttggtatgattttgactttttttttttttcctaagtagatataggaatttatggaaccatgtagcttagaatatgggggtagtcacagaatcaaaggaagcacggtaggagctggggcctcagggctggacagaggagtcctatgcctccaatacacgctgtctgttcttacctcccttggccctcagctcctcctcctgctgtgtccagtccttaccctgccccaagtatcagctccacagtcctgcttagcagccccaggcaaagagagtcttcctctctcagtacctctgttgattatttaatacttgtaatcacttcctacaaaagaagagccacttagcttaacaagctatgtgcactctcggtagttgacgttaacaaaggaaaaatcacacagggcctttgtgttcccttctcaggatgtgaggctgggggagactgatggggttagaacagaagtggtggagtgtcagactcagtggatcccttaggaatcaaatgtcttgttagtaaccgcagtatctggagagaattacttggacgtatttatgtcaattaagacaattcatattttcttaatccactttggatcttcctctgtctcccaacttcctctcaccctgcctccctagttactgctagttgagtctgtaatacccagaaaatatcttcctctgctttagaatgcagaaagtggtagattaatgtcccattattctcagaggtgaagagtgctgaataataagcctgctccttccccatttctctctcattaacagttttcacaccatgtagttatctcgtaccaggtcttgtctgacagtgtcctcttgtacgtgcctgtggcctcctagagcaggggcaagactagaggtaatcttgcctggtggcctctaagtagagacaccctacatcactggagagcattccagaacaaccatgatcgggcagacatctcactgtccactgcacagcttctctgtgagcaggccacacttgcgtctggcagcagtaaaagcacgttccacagtgatgttggagcagagagccgtgggtggggagatggggtgacagagggtagcagccagatctgagagttaagaacagaccctggggctggcaggagagaacaggaggagtcagaaattcatttctctagatggagaggacactgaccatgatgccaaagcagtcacaggagattcacagtagggccgcataataagtaagcctcttgctgaagactcgccctccaatttagtcctttttgcctgtcatgaattgcatcggctgctgtcattgagtcattccgagttctgtttgtaattggaacgcagctgaaattagggtgcacgtgaccctagagatgtgtgggtttctggaggatattcgggaaatatctccagaccctttgctccctctttctctgtgtctgtggattaggcggaggtgcttatcagataccctgggcccctgcatgtcccgctgctgtgctgtacctggttctcattctgaacacacggtnnnnnnnnnnnnnnnnnnnnnnnnnnnnnnnnnnnnnnnnnnnnnnnnnnnnnnnnnnnnnnnnnnnnnnnnnnngggctcccagaacagtcaggataaaggctttgtttgctttatgaaatccctgggaaaatcttaaaaggagaagtgcaataaagagctaggaaggacaagtggaattctttattgtgatgctgtaaaacacccctccagccttgagtatttcaggcacgccgatacacttcatcctcagtgccgacgtgtgctgcgggtgaagtgtgggcctgagctctgactccagcagtaggctcggctcacactcattgtcctacactcttattatgagattgctcttaatagcatgtcaggtttagggggtggttggatggcttcccagggtcagtgtaactggcccaggggatcatgctgatcttgacctaattccatggagctatatatactagttatcacagacagcagtttgaagttcttgcacctgtaggtttacatgcagaaagcaagtggaggtgggagggctgctaaatcctaactggcttcagtgcttgtattccacatgtcagagggaagccctcgcattttgttccacctcaaagaaacaacttggggtatgtcacttctttccttagggtagaatgaacatggtgcaagagtacacttttgttttgtttcgagacacgctcttgttctgtcacccagacttggagtcctgtggtgtgatcatggctcactgcagcctcgaactcccgggctgaagcaatcctcccaccttagcctcccgagtagctgggactacagtcatatgccaccatgcccagctaatttttaaactgtttttgtagagatggtatatcactatgttgcctaggctggtcttgaactcctgggcccaagtgatcctcccaccttggcctcccaaagtgtgagattataggcatgagctgccacgcccagacaggaattgaagttttgagagctgtttaaataatgacctggtttgggctctgtggggaggcgtcctgggctggtgacagagaaagctggatggtatcttagccccattttttccacccttgtcatgagatgctttcttgccatttttcccgtaggcccgatacttctccccacaagctcgccgtcgattccacgctgcccttgcttcttgttccacctcgatgctgatcctgtccaacctggtatttcttgggggcaatgaggttgggaaaacctactggaataggatcttcatacaaggtaagttgcttgacagtgctgttttcagtcagtttcttgttttccatgtatgcggatgggatcatacatgggatggatgggatttgggggaagtcattcattgttatgttcatggcatgtgacctctaaagtaccagccaggaataatttcctaagtttgactatgactttaagtgtcccctgtttttgaggtaccccatatctcctgtatgtgatacttgtttaacaccaaaaggtattattccaactctcccaaagtgtatattcccttccattacactatgtttccaattatttgatatttcttaatctttcctactgctgtggttgaatattcccttcaaaactcatgttgaaacttaatccccaattggcattattaagagatgaggcctttaagaggtgattggatcatgaggggtctgccctcatgaatggattaacccattcatggattaatgggttattatggaagtgggactggtgactttacaagaagaggaagaaagacctgagataggatgctcagcctcctcatcacgtgatgccctgtgctacctggggactctacagagagttcccaccagcaagaaggtcttcaccagatgcagccccttgaccttggacttctcagcttccgtaactgtaagaaataaattccatttctttataaattatacagttttagatattctgttataatcaacagacaacaaagacacctactgtctgtgggtcctagcctgcaatatactgcaaaatctaaccttgttttgtttattgctctgaacgtcctactaggaatttgccctagaagcttccttgtgctctcctgaagctgtgggcatggcatctgtgtttgccacagctcttggttgtgggtatttttgtgtgaatactaggggccaaccttatgtttaatgtgcattaaatagataatctgaatatccaaagcaaaaccatacttgcagcaggtaaactgctactatgtgggagttgtcaaaacattctattaataattgatcgttgtttatttatggtcaccatttcccttgggctgggactgagttacatcatatctataagagaattgggagatttggaactactcatggtacatactactacagccaacttgctacatcttaaaagagaagatccctgctctgttccctgcccagtgacacagtcttgtgcttttgctttgggaagctttgccaagtggtgatgacataactctgcacagctggcccattatctccacatctgggtccctgaggaggcagcggtgcttttgctgcagctcttttcacaccagaaataacagcaacacagctgcagtattccagaatggcagaccatgggcctaaactgtggcagccttgggtgagccaggctcaaagggccaagagagagtcctgttctactttaatcttgtcactaaaagacccctctttgatcttgttttctgtgcgatgttttagctgatagttcctgaaaagaccacgtactttctaagcgaaagctgtcctttaataaagatgagagataatagggcattatggatctaaagataaaggtgggttacagcatcctttacttttcttggctcctctcacagaacctagcacaatgataagaacattgtgacttggtcgggggaaagtgcggacttggtttgcttgtcacataatgaggaggctctgattttcgcttccctaaatcaaatgcattggatgtttgctacttgcgaggcactgagaacacagagatgaaaaaggaagctcacacgaatgtgagtgccaaacacacaaaaatgtgcagtagattcagggaattgctctgctggatgtatgagtgagttactggaggtcacaggatagagtagctgactttccacagaagatgggcttttcagaagaggtggcatttgaattgaagtaataatttaggagtttgctaggtagaaaaggcaggcatatcagggaaattaacactggctgctttgtgtgaaactccaaaatcttagtaatttctcaccatagaagtttgtttctctgacagttcaatacaaatccagtggctttttctaagcagtgactccaggacctagaatctttgttttgattctccactgtcttgtgctggcatcatggaggggaagagaacatgagactggtgcaccaggtgctcaaacatgtgacatttctgcttacatgtcattggccagagccagtcatatgaccaacccaagtacagggcaggggtgtgtagggaagcatgcagatatcagtgtgcaccagctgtctatggcacagcaggagaggcacatgggcctggtcagaaatgcccaagaggcagttggaaatatgagttggagaagatggtgggaccagtgattgagatgtgtgggggtcaagggcgtaaagattgtatgtgaggccaggggagtagacacaattaaccacggagctgtgtagaatgagaagagaacaggtgggagaaaccccagggaatgctggtattgaagggggcagagagaaaggcaggaagatcaaagtgtgacttgcctgacatcctatggagttaacctcagtcacatgggattgggctctgaaaacccggtctgctgctgcctcatgggaccagctatggtctgtgactgaacgcactatttgtgtcctccttggactcaggtgccacagccctgggaactctgattctataaaagtggagggctctgtggaatcatctctcttctgggttctgaggccagagaaactcagcttagaaggctttttctatgtcagtgattatccaaatgagcctgtttgcatctctgctggtctgtcccatgggcctcctgagtcagggaatgtctgctggggttttggcagttgccgcttcgtctattccttgctgtgggtttttgtccctgaaggattgggtttagatatctcttggaggaaagtgaaccagatggtgcccaatctcccatcctggagaactctggatttcatttcataactaatttgacttgatagaagattaatatgaatattcatgttttggtgaaaaaaaataatgagtctatacgatgctccctcagtctctgctgggggtgttcatatatgagctttctaaagttaaaaaaatctgaattccgaaactcatctgaccccaaaaagtttagttaagggattgtcaaactgtatatggagttgttgacaaatgtgcacctttgacagccttgtagtcttggcatcttccctgggacacatgatcagttcctgttgctccagagcccatctttacacactgaggaaatagagtgaagcgagtgagaacgctgactttagggatggagagcatttaagctcagtgtctagatttccaggtttaagggaaaggtggcccttccctctgcaccttgatgggttgggacctgctgcagcaagagggaggaaccactgacaccacatccctctaacaggtctcacctcagagtcctggaagagcaggaaggggcagacgggtatctaggagatagggattattgaggagatttgcacacacctcacagctaatggggtgtggatacacatgtgtcttaaaagatacacctcattgtttcccagggagccctctcctggcatcactgatgtgcctagaagtatctcatgattcgcctggaaaagttgtcttaaaattggtatcttcctgtcaccagttcacttgaatttagccatagatttgcttgctctaaactacaaagtttattttagtgatttccatgaaaatgtctgtcctggtctctgtgggtcatatgggtgatatgaggctgtaaaaccagacccttccctttctgttgtgcccctgccctgctgtctaaagagtggaagacagagtctgaaggcaagggatagaaatgctcagtggcaaacctagggctctggtaatatgtcatccacaaaacagttttggtcaggaagtgttacctctgctgctgaggttgaagaagtagtgttcagtttattcagcagaaaataaggaatctatgtttttgctttaaaaaaaactccaaatttttaatattgaagtttacttcaagctgcttgaggaatatgcatatctagggctcacaaactttatttaaaagacttagctggtccatggatctgagaaggatatggctggagatttggtccaaatgctgttctaggaggaattctgctgtgtcatgctttgcagagaccaatgcaggttgctttttacaagccctttggctctcagaagcacttgttaatagaaggagctttctcatgcctaccataaatctttgacattgaagcataatatcttcaacaagcagctgaatagagctctgtaattcaaaggtatcaaggagttgtaactccagaccagcaaggccagtccccataaaccagctgtgacctaagcatcttggcagtgatctctccaccgtcctggggtaatgaggagaaaaagtattcaagggggggtgtttatacactgggaatatatctggccttgagagggtggagagccttataatgtgtgtatgggtgcagaatggtgcttcttctgaaaagtctgcctgcttttgtccagggaagccatggactttgtttaaaaaaaagaaaaaaaaggaaaaccaaaacatttcccaagtggtggggcctggatcactggggtgatccagtgataatgttgcagtgacaagagcttggtagagatgtggcatccaccaaacattgccttgtctgatgcctcattacacacacacacctgtacacacatgcacacgtacacacatggatgtttgtttttccttctattatccgatctattttggcaagctctgccttaacacttagctcctggagtgaccccatgccaaggcaaggagaatttggttctttttccctctagattgcaatgagagaggagctggtaattttcttatgcaggtccccatattttcttgctatttctagctgagagaagagaaagtatattttctccctgattactagcttgtctgagcagtttatttgtctcctaactcaaatggttctggacaggcattttatttaaagctgaactggagtattgcactagagattctggagggttgttattaaatagaaactcattcccatcatatcttcttaaattcttgggattaaaaatttcatttctgatgaaagaggacggagggcaggtgtcggtgtctcagaggccatcctttctgatgactttgtttcgcggtctttcctagcccttccctctaagtggagttttcactgctatcattgattgtgtctctacctcactggatcctctgagagttctagaagagtttgagaagcaggtgcttcctgtgcatcatacctaagggtgatgaggttgacatgtagatgtaggttagacagtctatccgtgtttacatcattggtccatttatgaccattcttggaatctgaatgtcaagacttgcagaagccttggtttctttactgtatgccacatggccagccagaggccttgggcattagttttcctacaagtaattccagccaagtcaaccaggcatagaatgtgaggaatagtgagtgaaagtccttattcagaagtgcacctggggttgtgttaaagctgaaacaaattctaaaacacccaggaagggctttcaaccagagaacacttaaagcttttgtgctaggttatggaaactttttcctgctaatcagagtttccagggcactgaacgctgaccacttgctgtgttgccacattggttccctatggctactgtaacaagttattacaaacttgttggcttaaaacaacacaagtttatttttcttacagttgcgaggaccagaagtttgaaatcagtctcactgggctaaagtcaaggtgttggcaaggctggttccttctggaggctataggggagaagctgtttccttaccttttccagtttacagagatgggtttcttttggctcatgccttccttccttcctctgttttcaaagccagcagtgtagcatcttcaaaccatgtttcttcatctctctgcttctgtcacacatatctgcctcttgtcttgctgtctcctcctgtttctgttttttttttgttttttgttttttgtttttgagacggagtctctgtcacccaggttggagtgcagtggcatgatctcagctcactgcaacctccgcctccggggttcaaggtattctcctgcttcagcctcccgagtagctgggattacaggtgtgcaccaccacacccggctaatttttgtatatttagtagagacggggtttcaccatgttcgtcaggctggtcttgaactcctgacctcatgatctgcccaactcagcctcccaaagtgctaggattacaggcgtgagccaccgcacctggcctcctcctctgtctctcttataatgacctttgtgattccactgggcctgcccggatagtccagagtaatctcccatctcaaaatctctcattttgatcaccttagcaaggtccctattgctgtgtgaggtgactttgacaggtctgggggcttagagggtgggcatctctagaggagccgttactcagcctaccgcagcatgctgacatgggcaattgctatggtgcagaacaccccttggtgacaccactaccatagcttctttctaaagagatttggttataatagcaatttggatgtgccactagcctccttaaaatgtgaatctccctgtcaaaagaaataataattaaatttcacagaaggacacaagtgagatttgttatcttcagggaatttcaagggtggtgttgaggactgctgcagttttgcctgctcagtgtttgtttccaattctttggtaacagccccctgcttttcctttgggaacagatctctcccacccgctctcagtctgtgtgattcaggtggggcacaccccgtatctaagatctgcaagcaacatgcgacccaggactcgccaggcagtagggtccatctccctgtgtgatacaattccagagcttttgctggaactattgggaagcagaagcaatctctcctttggagtgtggagttgtcaggatgcagagctggagctgctgagccctctcgtcttcctagtggacagccgtggaggcggggggccagctcagaggaaggcagagctgcaggatggaaactgaagccatataattttgagcccctagatcgaggaatgcctgaagccaacatatctttgtatttttctgttacaggaggtttatttttattttttttactcaatccatgttgggagacagcattccagggctttcctgtgtttctgcatttcttacaaacagaggtactggctacctttgttcccaactatttttcctggaatatttgtatagaaaacacctccgaattgtccagctactaagcagcaatatcaggtgagattataagccctttgactccaaattctactcttctctctctgctctgtgaggcctaaatcatgacaggcaaccactgtttacaccatgaaccatccctgggtgtcactatcagagacagtctaaagtgcctggttaattgttctgattcttagtacttctccactgagcaagttgggagggtgacaagagtcagaccttccagcctctgggactgatagaccagcttgaggcttgctagctggattggcactgaccagtctacacacctacaactctttatcccaagcctgctcagttggtcaaggactctggcttccctctttagatttactctgacattgcattagattgctcccacgccctgtttccagtgtaattactcttttccagaccaagaaagcagtggaaagaggaaatcattttgttttggcacacaatttcaaagaccagggaaacagaattatctcagggtggctgtcataagagctgagggcctgtgactgtcacatgtaagggcggcgctggaaatgcaacaaaggacaacagcatggctggctgtggttcttgtctttgcagtgaagatcagaaagtggaatccaggggaccttttccttgcctcaggaattctatctggcatgatggtcatttatcttgagtgtaattaaggcactcaaatctttcagttaatattcaacaaatgggagtgaagactatacaaaaaaacttttcattatcttgaaacaaagacggaaaaaagcaaatcctgttttgtcagcacctgtttggtatcatgtaagattgttgaagggtcagagcttccagctgacacctgtcaattgggcctagttgggccatttttctctgtactaacctaactctcccagctgccggtggctgccctgatcacattagctgctgctgtggagtattctctctaaggggaagctactgaaagggcaaagcatggaaaagagtgtgttacggttgaattgtgcccagctgatgaagtcctaaccaccagtacttcaaaatgtgaccttatttggaaatagggtctttatagaagtgataatgaagcagcatcattgtctagggtaaatacccgaggtttgtcatctcacagcaaggaaatcgagtatgcggacacacaagaagtgggtttaggagtggaggtttaataggcaaaagaaagagaaaagggaacagctctttgtcttgaggaggtgatgtctgatttacatagggcccaaagattggttggaccaggtgtgatgtttacatggcatgaggaagctagcctggctggtgccatgtcacctgctcattactgtacacatggttggcaaagaaaagggaagatggagccgccattttggacatgcctactccccccatagcctctttcctattggcacaactgccggcattcaaactgccatgccagcttccagcttgcttgtctatgtctgcgttcgattttacaagctgctctttgttagaaaatggtttgggggctgcttttcattaaaaggaaaaccttaccgaggacttcctcactatctgcctaaataacttcttcttacttcctatatcaataagttaaaaatgagattattagggtagactctggtgtccttataaaaaggggaactttgaatactgagatagacatgcacagaggaagataatgtaaaaccacagggacccaggcggccatggggagatggaggcagggattggagtgatgctgccacaaaggaacacctggagccaccaaaagctgggaagaacaaggaaggctcctccccaccagatgttgaggggagcctgtccctgctggctccttgatttcagatttctagcctccgtaacaaacagacactaaatttctgtggttctaagccacctggttggtagtatttggttctggctgccctagggaatgaatatagggaggattctgttgtgtggagtatgaagttggggtagggagaggtactgagatgggctgccagtgactcttcctcactgtaagaaacagttcatgagtccagcagctggagggccagaaacgcccacttcaaatgttcaggtccacatgatggttagactttgctgtctgggcatgggccctaggacagacattccaacagtgtgaagtgaggatgggagtagtcaaatgcccggtcgcagcaatgtcacatggttatccagaggcacagtgagggccctgggaggtgagaagcaaggaaagccagccttctggttcctggagagccattgtctttcacaggtgatccaggtcaggcaagagcagggatgtggtaggtgaaggcaggtgagcagaaacagggccccacagtgagtgtcccggatgcaccaataagccacttttaaaacaaagccaaacttccagcccccgcctgacttcatatttatcttctcctcttctgcccttctctaacccctgacattgattacacaggaagcagcagataggaataactagcctggcagtgtgtgtcaccctgtgtcaggctggcagattgaggcttccgggcagggcaggcagagctgatactccacttgagagccaccctgcatcccaccaacccagggccgaagcctttgtcccctgggcgcttgctggcgcatgtgcccacagagcctctctgcgcccttttgttctcctctggctattgtagcgtgccagctgctgaccactcttgcccagagaaggaggcagctgctaattttagccctacttaggtctccagacagcacatctcaggacttaaaaaaaaatattttttggttacatttttacatgaccttgggaaacaaaaaattgggaagacttcacctgatatcagtaaaatgaaaagggaaatttaacctttgttttaaaaaagttattgtatttctttgctgttagaaatctcctggggccaggggcaatgtctaagagagtttacttgtaacctgtggcttttagtggggtaagaagacagacaactgagcgctaagccacgggatagaacattccgcccagagagcactaggaagatgtttctggcctgcttgggggaggccaagccaccctgttgatgacaagggaatgtggatttttgctgggtaaacctgatttccgtttttccccattgtttacatgttgggtagatgggaccactctcatttgtcttggttccaagctgggtcgcctcagtgagaaggcctttgaaacacatctgttgaatcatgcacagcagggagccatttgtgttctgagggttgtcaatcatagaaaatctgaaaaataccagacaacataatggcacagcagccaaaccatgcctggacattttctggtcacacaggtctgtctgtggagctgcgctttttctcagacagtcattgggtttctttttaataagctagaagaaaccagctaagttttaacttaacaaaattgttcctgatcttgttgtttttctgtttgtgttcacagttatccataacttactttagtcatatttgaagctaacctcttgattacttttctcactttatgaccgcgctttaagattgctggagggttggctcatgacttttggattgcaatacaaaatttctatcagccagggctttactaagaaaagcaaaagtacatggcaaggaaataagcaatgtgggaagcatctcagcttatctgaggcaggagaaagagggacagtggtcagctgagtctgggtgcaaggctaagttatttttacagagaatactgctagaaggagagggttttggggacatagtgctttgatatatgcattgaggacaaaaaggtgaatggctcagggatgcaccaataagctgattttaaaacaaagccaaacttctagctatcacttgccttaatatctgtcttaattttgtcttctgggtgagaaagtcaccatagaggaggtgacatcagaggtgggcttaatggatgagtaagtaccagactcgggggatggggcacagcctgtacaaagatatggaggtataaatcatatattcaagaactgcaagcatcctgggatcatagccagagagaatgcaaggtgtgatattgatgagtaagctgtttgcaccaacaaacaccaggaaggtaacctgaggatcagagaagcccatacatgccatgctgaggtgtgtgcacttcatccttagtaggctgagagaggcaggaactacaaggatttttgcaagagagtgacatgattttcatctttgaaagatctatctagaggtcatgtgaaggggagcagtactaggcgcagggtgatcagggggaggcggtggaaaagatgatgaggctgtcagctatggctgtcgcgcatcaaaggacagaaaagatggaagaagaaatcttcagagttctcccagggagaattttagggaatctgttaagtcttcataatttgtacaataatggttttggtacctctgagatgggcaaaaatacttgaggtttatcctttttatttggtagctcattatagattaatttctgaagtttggagaaagaatggtcactccagatttcccctctgtttctttggctttgcccctagaatttgaaaggatatgcaagtgccaaggagaatgtcaaaacaaagaggggacgctttgcggagatgagccacttattccacgtactacctgaatgaatactttttccaaggctaagttcgttctggaaggggggtgccttttatagaaagtgtttgttctctgcagatattttacagatatttcaggttcgtcttttgtttccttaaacatcaataagcatagctgctttgtaatctatgtttgatactttaaatattttaaatctgtatgaatctgtgtctgctgtgttcttgtactgctgggttttacccctaacttctctttccttggatacttggttatctttgtctatgtgctgcccattatcttgcttaattacatgtgaggtattcctgaggcctagtgtgaaggtatcttcctccagacaaaatttgtgcttgtatctgccagaccaatagggctgacccaatagttacatttccttagggagggattcacttccctccccttctcctttggaggtgggaactaggtttacttctggttcacccttaacctgaggatgattatgattattttctgggccccagcttaatgtgtttttgaggtccacctgttagacttattgcttttgtcaggctctgggatttttcttctgctatcttatcccaaaggctgcagcacagtctagacagacagatgtcttcaggaaaaaaacaactttaagaactttctttgcctcctttggttctcattttctcttagattttggcctggttattccttactgtctttccggaatgttgctagctgtttggggaaaaaattaaaatatttatctgacaattttagaattctattttctcccagtggtagtattggtacaaataatatacctaccattgccggaaacagaagtcttagattctacagaaatcctgcttttcctctgagtcaaacatcccaattgaaacatctaaggtatgacaatatgcttcaaatataaataggaagtgttaggtaaatgtcttattagtgaattcatattgaattgctaagagaagttaggtgtgtctgagatatcccctgatttctgagggctgttacagagacagtgtaggatggtagtggaggactctggaatcagacacaattgagccactttactagtatgggaacttggacaagggacctaacctctctactactcaaattcccacctgtaaattgagaaaaacacctacctcgtagggggttgtagagattaaatacgataataaatataaccttacacagttcctggcatgtgatgaccccctactaatggtagctggttattggtactggtattatattaacattattctgccacatggccccatttttcttctatcaaaataatttggtggatatgtacatgcaaaagaatgaagttggatccatacctcacatcatatacaaaagttaactcaaaatggatcaaagaccaaaatgtaagagccaaaactataaaactcttaaaagaagataaatcttcatgactttggattaaataataatttctcagatatgacaccaaagacacaagtaacagaagaaaaaatagatcaattgggtgtcatcaaaactaaaaactttggtgcttcaaaggacaacatcaagaaaacgaaaatacatccagaatatgagaaatttttgcaaatcatataatgatgagaaacttgtatctagaatatataactcaatgataaaaaagacaaatcacccaattaaaaatgggcaaccgggcatggtggctcacacctctaatcccagaactttgggaggccgaggcaggaggataatgaggtcaagagatcgagaccatcctggccaacatgttgaaaccccgtctcccctaaaaatacaaaaattagctgagcatgggggcacacgcctgtagtcccagctactcgggaggctgaggcaggagaatcgcttgaacccaggaggcagaggttgcagtgagccaagattgtgcctctgcactccagtctggcaacagagtgagactccgtctcaaaaaaaaaaaaaaaggggggggcaaaggacctgaatagatatgtatgcagagaagatctacaaatgattaataagcacatgaaaagacattcagcatcgttagacttcaggaaaatgcacattaaaaccgcaataagatactacttcacagctactcagatggctataataacaaaaaatggaaaataacaactgttggtgaggatgtggagaaattggaacctttactgctgatgggagtgtaaaatggaaaacagtttgggctgcagtctggtagtttcttaaaaagttaaacatagagttactatatgacatagcaattctactcctgtatatgtgcccaagaaagatgaaaacttatgttcacacaacacttgtatgtgaattttcataccagcattctgtgtaatagccaaaaagtagaaacaatccaaacatctgtcaaatgatatgtggcatatccatacaatggagtattattcagcaataaagagaaatgaagtactgatttatgctacaacatggatgaaccttggaaacacggtaaatgaaagaagccagtcacaaaggaccacatgttgttgattctatttataaaatgtccagaataggcaaatctatagagacacaaatagaatagtagttgtctggaactgggagggatagggatttgtagggtaatagctaatgggcatgggtttctttttaggggataatgaaatattctaaaattgaatatggggcttggtatggttgcctatgcccataatcttagcactttggcaggttgagacaggaagatcacttcccttgagtccaggatttcgagaccagcttaagcaacatagagagaccctgtatttacaaaaaaaaaaaaaaaaaaaaaaattcttttaaatagccaggtgtggtggcatgtgcctgtagtcccagcttctctggaggctgaggtgggaggattgcttgagcccgggaggccaaggttgcagtgagctatgatcacaccactgcaccccagcctgggtgacagagtgagaccctccctcaaaaataaaatacttaaaaattaaaaacaaaaatgattgtggtgatggttcaacaactctgtgaatatactatgagccactgaattgtgttctttaaattggtgatttatgtgatatgcaaatcttatctcaataagctgttaaaaacagtttaaggttaaaagataattgatccgatatggccctatctgctccgtccatctgtctatttgtcttcccatccattttatccattcatccatgcacccaacagcctgtccactcttccttccttcaacccattcatttggccatttacctttccttctgtcctcccaactcatcccatgccattttgccttcctccctcactctgtcaatccaaaacaaaaaacaaaaaacaaaaaaaaacttgatttgctgctcatctgctaaagtttagtctgtactagtcatcatgtaagtctctgcttttcatcatgctagtttggcatttccagtgtccttgtgacttgccacttagcataagatgagttttccaagctctccagaggaaatgctctttatcaatccatccagtaaacagatggatgcatagatgtggggagtttgatacatagccagcgtcttgctgaaatggcaggaacatccaggttgcatctcacctgagagaagtcctcaaaatggtgtgcagaaaatttggggtttgttgtttgctatgacatctcagtgttaaatgtgcatgacactcactctttcctcctttcagtggcgcagtgcaggtttgatgcctggtagctgcattccccattattaacacaatgttgagtgatttcaaggttgacctggttcaaaacaactttcttaatgagaccgttcccctttgtgtcatcgttagtatgatgtcagttcttcccttgcccaacctccagtacagttgtttcctaactttattgcccatcagagtcacctggaaagattatttaaaatgcagagtcctgagctcctgcctttaagagattctgattcagtgggtctagggtagcatccaggaaccagtgttttaaggagcacccctagtgactcttgattggaatgttccttgtactaccctgagatactctaccataattgatctgttaatgccagcattagttaacagtatgggagacttctaatttccctgcctggctagtgctcatttcttcaagcctggaagtgttaatccatggctaagaagaagccattactattctgtgtatctccgactgagttagtgggtagattatagtgctttgagagtttcgaaggtggcaagaactcagcagccctaggcaactctcatatatccagtgatgtagatactacaaactaacttatccaaataatcagtgtctggggttagaaacatactgtttgatattagatttttgcccttcttcatttttcttggcttaataagaaaactttttggagacaagagggagtggccttatgaagagaattgtttggggctaaggggtgaaattagatgttagttgtaatgaaaactcttctctgaccacagaatactgagttctgactccaataagctgagtattgggctttaaaatgcctctagatctgcacacaactcaagatgctatgtggacacagttttttttttctgatgaaggtataaacccatcagaacactaaattcctcaccatcaaaatgtctttgccaaagccctaacatggaactgtattcaaaacatgcgtgcgtgtaacccccgcactccgcccccccactgccccccacacacgcacccctttaggctaatgttagccagctttgttatttgggattttgaagtacaaacaaggaaatgggaggcttaaactaaatttcagctggacctgagggagaaaatactgcaatagcatcttgccttaggtggacacgattatggtttgcaaagcacatttatttgcattatagtcctatgatatagattgaactagaattcaagttaaatgacctgccaaacccacctaggtagtaaatggcagagctgatttttgagcccatgtcatctagctgctgcttcagtgctattttcactacatcacactactaagaaaatgctggggttttacgagttatctggctggatttaataactgaaaggaaccttaccttgttctttagggtacgaatgatgagctactgaatactgtatgaaaagaactgtgtaaatgtttgtgacatggtgtcagtgattagtgtatgtgttttcgggaagaattgaatgtccatatagtggggcaggaaaatctcagcacttgtcttcctattagtatctcttttaggaagactcccaggaacatataacacacatatagtaaaatgcacaagtgttaaatgtgccgaatgatcagtttttaaaattgaagacacctgtttagtcagtacccagcatcctggaagttactccttgtgatcccttttagttgtaatcccctttagagtaaccaataccctgttatctattaggttggtacgcaagtaattgcagtttttgccattaattttaatagcaaaaacagcaattactgtgcaccaacctaataacaatatagattaaattttgcctatgtttgaactttatttaaatagaataataaggtactagcagttctgctataatgcttgtttcgaaaatgcaaatttccattatgattgatgcattagagaacaattcaagcataacgcaatttagtgtttgcttatatgcaattttgtcctcaagaaattctaagtgaatgcagaaaacttcactcagcgaaactgagcccagtagggacacacagcatgcacatacgcgtacctcatatatctaccagccacctgggttgattgtgttatgagacacacccatccacatctagtgttacacattccatccaatcgtaggcaatgctgcttctgccatgtcacaataacttgcaagctgcaacccttcttacaccctcttccacaagcaaacttcaggtctttttcaacataaaatcttatttattctagtatgtatgcagttcttaacaattttacatgtgtaaaactgtgcttccatttttattagatttctgtatttttttaaatttgtcactgccaaagttttgaatgttttgttcctaaccctgtctttcccataagccctatgattttagttgcatgcgtttgcatattgcgttacttttgaggaacacatccatcacattaaagcagaagggactgtatttctcttttgtgtctggctccttttgagattatgtttgaaagatttatcattgttatgtatagcaatagttcattcattttcattgctgtacagtatttcgttgtgtgaacataccacaattcatgtatctattcaactgatgatggacttgtagattgtttttagattgagactgttaaaaaccttgtacatatttctgttgagtatatactcaggaaattgctgggtcttataatatgtgtatgttcagcttcagtagaagtggccagttttccaatggggttgcaccaatttattgtctcacaagagtgcatgaggaacctagtggcctcaaatcctttccaaaacttgtaactgtctttttaattttagctattctgataggtgtgtttggcatctcatcatgattttaatttgcatttccttgatgactaaagtttaagtatctttgcaatgtttattagccatctgtatactcttttctgtgaaatgtctttagaagtcttttggccatttaaaaataattgagttgattggctttttcttctcgatttataggcatatattctgggtaagaattttttgttggttttatatgttgtaaatatgttctcccactctgtggcttccattttttactcttttaatgatgttttctgagggacaaggtttttacttttcaagtcctatttatcagtgagttccttcattgttagtactttctatgttctgattaggaaatacttgcttaccccaagctcatgaagatattgctctatgttatcttctattagtagaagctttacttttttaatttccctatttacatctacaatatgtttagtattaattttgtgtataatgtgcgatagggatcaattttttttggtctgtttggatatttaattgacccagcaacattcattgaaaaaaccattgtatcccccacagatgtgtactacagcctttgtcataaatcaaatgtccatggtctgtttgcctcttgctgggccaatactgcactatcttaaatcttgttgctgtgaatgtaattccttaatcttcattcttcaaaattgtcttggatacacttaaattttttacttcggaaacatcttgtcagtttctacaaaaaaatttaacttggttggctttagattggaattacattgaatgtgtatataaatttgttaagaattgacatctctacaatattggtacatcccttgatttatttaggcaacaaatataaaactcatagtcagtgttagtctttgattaatcacaaatgaaatgattatttatataggtgggggaagtatcttatgtattccaaaatgttctggaacataccatgcgtccagagggtgaatcattccttcctcttttgtaaggcatcatggtaatcatgtcagttgaagttggagatgcagagatggaggagatcatgatttagcactggtcaatgaatcttttgcagattttgtgtgaacgacctggctgcagagagtggcatttgcgttgtctttcagtagattcatttttttttttttaaccaccagacaactttgttggaagagaaaaaggaacatcttattcaatttaatagacagaatttaaatacaaaagagctaattgcagaagcatctggaaacattacacagatgagccagtggtgtttagaggtggtggaaaatgatatattcatatgccaagaattaagatgtgatatttttgaaatttttattttatggagaaatttctttttttttctgttttaagatctgtagcttaaaagatggatattctgaagaattatttagaaatttggaggtcctctggcccacctctctcccaaagcagcacactgattccagtatactttgcagaagccatagaattgtagatagttagatccaaaaagatgttggaggagagactctggcctaaccctcccattttggaaaagacactgaggtctagagaggtaacattacttgtatacaaccaggactagaggccaagtctcctgactctcagaccaatgctcatttcaagagttcagcatttctcaaagtattctcaaagtataatccaaagaaatagtaatcattttgggagagtgaagtgcgtcatctaagaagaagtagccttgggctggatgctttgactcatgcctgtaatcccagcactttgggaggccaacgcaggcggatcacctgaggtcaggagttcgagaccagcctggccaacatggcgaaatcccgtctctactaaaaatataaaaattagctaggcgtggtggtgggcgcccataatctcagctacttaggagtctgaggcaggataattgcttgaacgtgggaggcagaggttgtgggaagctgagatcatgccactgcactccagtctgagtgacaaagcaagactccatctcaaaaaaaaaaaaaaaaaaaaaaaaagtaatagtagtcttgggagagtggagtgatcaatctaaaaggggatccttggcaaaattagtttgggaacttttgcatagcatgtcttcttttggaaatttatggtatacattggcacttttgccatatagtaaggagagttatttaattttaattcggtcttttctaaacatttaaccatggaccactttttgcacagaacaacttgttataagacctggggcactccgggaaacctgcagtaggtgatgtgggtctgcctgacagcctttgccgctggtaagggctctccttgtaacttccacttactgcgcatggccgtgtcctctggagtggtcatttggaggtagggtttctctcacatttactaattgcgcttgcctgggcctttaatatatttaaagttaatatatttagttaatatatttagtcctcacaaaattttctagaaaggtggttagtataatctctgctttatagatgaggaaacaaagaatccaagaggttacacaacttgttcaaggccacccagcctagcggacgggacaggcttgccgtcacacctagctgcctccctaccagatactaccttccttattatggagacaccaccatttgttgctgtactttttatgaaatccactttatttaggtatatatatttttttgagacggagtctctctctgtcgcccaggctgaagttcggtggcacgatctcagctcactgcaagctctgccccccgggttcacgccattctcctgcctcagcctcctgagtagctgggactacaggcgcccaccaccacaccttgctaattttttgtattttttagtagagatggggtttcaccatgttagccaggaaggtataatttttatacagtaaaatgcagtccctttatcgcaagtactggatagtattcaacacattttgacaagttgatatacctgtgcagttgctgccaccatcaagctatgaagcaattaacgtggttgggttcgcactgcgaggtgtatgctttctttctcagttctgtcctcaaagcttttgctgtgttgctgtgggtctgctttgtgccactcaaggtttagtctgggactcgatcatgcttgaaatgttagttcagttgcccaggccttcctgataccagtttgggtccctcctgtgcagctgaggcctgcatctgagacttgtagtggttcatgcactggaaaccccttacccagctcactctctttcagggttccctatacgctctctagcccacagggccccctttttttgatcactttggccagaaagatcagatttccatcaggagtttagcctccctgttgctgcttcaccctgcagttctgcaactgggacctgccctcccagctcagctgagagataaaagaggaaaaagataatgggaaactcacccccgtgcttcagcaagttttgagtcctccaaaatctgctgactgtgtttgcttttttgagtactctggtagttgctttgtatactttgcacggagtttttcatgtaagtagtgggagatcatagtggaaccagaagtctctgtttacttttaaatatgtttggtttttgttacaagagacttctaagcagctggactttaaggcctatttttaaaaactcctgagaataaaagggactatgcatattattatactaaagcagaaaaaaatatttacaaactcctagcctgaacctcttgcgctggcaggataagttcctgttttctaatctccaaaggaatgaatgaatgttctcaccactgtgtgctctattctaatccttttaggcctaatgaagaggctgtgaacatatccctgagccctaggattaaaagtcaagacaaaagcccgtaagacaagaagacactgaatcctatttcttgcttttatgaaaattacaatatctcttggaaagaaaaactgtgtttcttttgccaatattttttatcacactaaggaaaatttgaaaataacagaaatggaagaaaataacctataatcccataacccagaaataatcactgctaacattttctcttagcttacagatcttgcagaaatacatctttatcttctgtttacaattttactacagtattaactatggagtataaaaatgattatgaactgaaactctagatattttatataaaaatcttctcattgtatatttaaaataattctgagaaattaatggctagttggcaataaatgaagatccgtaatttgttcattattttaaaataaaaaacattagcatccccagctattccaattttgagtaaaattattcactcaaatctttaaagaaaaaagagatgcaagtaatggatgatttcttcccactgtattagcctccttgaactgctgtggcaaagaccacaaactagagagtttaggtaacagaaatttattctctcccagttctggaggcttgaagtccataatccaagcgtcagaagcgcattctctcttcgagacttggtagaatcctgccttgactctcccttgcgcttttcatgttccttggattgtagctacatcactcctatctgtctcctgtctgtcttttcttctgatgaggacaccagtcttaattagttttagggcctatcttcattgaatgtgacctcatttaacttcattacatctgcaaagatcccacttccaaatcattacattctgaggtactaagagtgatgacttctacatacctttcgggggacacaattcaacccataagacctattatttggtccttttccccattccactggggacatttttcctccagccaggatgcctatctctccactgtaaccagcagagctgcctcagacagaaatgtcatatggcacgttagggggagttgccttatgcggtaccctggccgccatcctccctgcttcccaccgcccccagccctgtaaacctgtccactccttttctacccccaccccttatcctgatatctctggcaaggagttagaaccttaccagagctgagggcatctttctggttttcacaagaacaaaaagccgagggtaaatgtgaaactatgtggaggaaacagatttctcttcttaaatttccagattcagaaacaattattgaacatctgttatgcctgggcactgggccagtttcctttaatctgtgtaaaatcatttacttaaaatgctatacaacttttattgctgaggagacagttttagctaggtcaagtcacatagtaggtacatttcagagtggggctttaaatctgcaatggcagcctgaaggtagaaaaattgtagtaaagagtctggctccgtttttggtgcttaactactgacagctttcaagccccacccctctgttttcttgtgtcccacctctgggtaagcctgtaagaaaacagacctggccctttcctgggtgctggcaggaagttcaaaccaagcaaacccaaccactggtctgaccctcaccacagttaaaaccaaagccacttgcctttccctttgtttaagctggtttggaatggcttggatctctgctatctccagaaagccacattatatgagtaataaccttttcagaccctcctggtgcagtatgatgtaatcagtctcaatgtctgagccaattttgcatggagaatctgtgtaacatccacagataaaagtaaggaaattgagtgctgcctcactgatcctcagaggcctagtatgaacatatagtcagcatacgttcagctgacggagacttgaagccatgcatttattgttgaggtcctttctccccagcagtgtacttggtgaggacagtgatggagacaaggttctttccgtctttgcagtatttgtttcttctcttctgctgttgcacaggtctgagttctttactcattggtggaggtcttaaattttttcctccgtatccaatctgcttattcagtgctatttggttattatcccaagaccctaaatttatatacacttactgttaaagccccacaagctgattgattatgcataacacgcattctccagaacatgcattttccagcagttactgttttcccccaggtgaagatttatttgtcctatagagaaatgagtggctgtatgtatgcatgtgtgttactacataatgcaggattaatttgaaaattgcatggaggtctgaatgtgcattatgcaaaatgcaaaagctggttgtattatgagcatttgagttaacatgcctgcatacagaaatgttcagggaatttgtggttcagttcaagtgacaccaggattgagccttttaaaaacagaccattcccagaataatgattctataatttattcagagtcagacatctagtactgctgaattttgtgttaaataacccaattggtatatatgaaaatagcttccttggaatcagcccaactgtataatcttggcctcggcaaatacttaaagagggtagaggggatgtttagcatacatttggctatatattcaactctggtaagtaatagaggggaattattctcagatacatggctgtcttcagatggtgtttggaatctcattctggctcccctctgaccactcagcacacccaggatccccttttactttctttgtctaagtgagctaggaatagagactcattttcatgatttttctaagcatggcataattgccacgggaaattggcatggcttcacaaaataagccgtggcttcacattggctcctaaagagtaggctggagaggcctgagtgggtcagaccaaggtaaccctggcacagtgctggtcacacagaatacagcagtgattggtagtgttgggacctaacatcaccatgactaacacagacctatatgaccctcagatagcagagtaatgcagtattgctcccagtgtgaggatgggctgcttgcagccatgacactgttcacactgtgtctccctaaaggttttatgtcatctctggcaggagccacatggagatcagagtcgagaatgaccttgacctgtcctatgtgttgtcaactctcatgtcccacttacgggtaatgggaaagcagaatgttggagtgttgggtttggggatccaggtcagcatgacagaaatcatgctaccgacagagccaacaatgctgaaggggtcataggtttatagggcagcagcttctttggaagttaaaagcaataaaaccacaaggcacttatgcaaggagagtatcttcagggtttgtgtctccatacctgcataggctactcatatcatttagcatcagaaatgtgcttgttcagtgacaagtgttaggcttcaggaaagctttttggatttatagttgtgagatgtcaaagaacattcttgtcagagtttttcccctgcctccccagtagaaagggaaagaaacctgttcatcttgcctatatggcatgatgctgaggactgggatattgaacatgactcggaaacagctcaagtttgctgcttgagatttgggtttttcattatttcccattcttgaatcctgttgaataaatagagaatcagatggctcctattctcataatggttttgtgagtagggattgataatcctggttttaaagatgagaaaacaagaggctcagagaagttggtgtacagagctaacaagtgatggagctcaggactcctgagtccaagagcagggctcttttctgtggctgggagttctggctcctaaaactggccccaactgtggaggataggacatcttactcctttcttctttgtgtttctgaatcctagagagtgtgctgaaatagaattttcaaaaattcatttgtaaaggtcacccttaaaaagggttgaactataggtgcattctcgggagcatagtctgattattttttcttttcattaaaagagcaaacataatacaagggccttttgtttgcagctttggaatttagccaattataaatacatttaaggggattcggatccaactcaagctcttaatcagagcatttggaagctcttggatagaaggtatatttaatctctttctaggtcagctggatatccctgcatagctattagtttagacaagacaagctttggagcccttctttgcttataatgtgttgtgggtgatgtttgggagtgagctagaggcacatggacctgaggcaggcctataatttatgaatttatttgcttcatggcatactccttccttagtttgtccatgaggggcaaatataatttttaacatattctcatattataaatttagtaagggaaagagaagactcatcagctatatgaaatttcactttttaaatatattggaaagctgtagataattgccaggagccacacaatctcatccctagggggagagaggaaccagctcagaatggagcctggagtaattgtgactctgatcacaggagaaagagaacacttggtaagaattcctctagttgaatctccataaaggctgaaacccccaaagttctgggtctgtcttctgtgcatggcaaatgcccctactcatctctccagactcagcagaattattgcctctccacaggggcagtgatcagcctctggtctacagttgggagttagatgatatacctgtcaagatccagtctggaaaacagagactatactaggtatttaagcagcagggatttgatatggggaattacacaagtattagaaagctgaaagagcaaaaagggacactgaggcatcccagatatgagtaactgtagaaagcagttactgcccctagggttgggaaacacaagggaagaagtgcatcactagaatctaagatctcagagaagaggcccctggcagctgtgcttaggcctctgaagggtaccctgcggcttacgatggaacctcagagcagggggactgcgcagccagctctcagaccccaagggaggtgagtgctgttgaggttgagagtgtcggtagaagctggaggctggacccactgctgccttctagggctggagggacattgacaagaactggaaataggaaggaagttcagttgtcctcttctcctgctacactgcaataggaattgctcagaattgagatgcaaaacaagcatagtcatagggcctagaccatcccagagaggatcatggaaaacctgggcatccaagtaagtaaagcagccctggtggcctctaggccagggcttggttgtcagtaagggcaacccaggaaaggggctaatggagctggaggtgggggcccacaggagccctgagtcctgaccttgagaggcccagaaatggtgtggctgaggctaattcatcatccatcctgactgactctgaactgaaggaaagcctagctgtcaagagctggaggaagtaattggaatagatgctggatacacatcagccactctatcatgacatttccaagagagaagtctcaatgagaaaagccttgcccaccccaagtagtattaaatgggtgggtggatgggatgatagatggaatagaggggattggaagagagagaacagggagtagagataggaataaaggaaggaaggaaagaaagaatggaggaatcaaaacaaattcttatctctagctctctagccgaagggtcttaagagtgaaaatagaagtagcatacagcctttcctgtaggtggtggctcactatgaaccccttgcagagattatgatgccagtagtaaggaagttggttttgatttcctcgcttaataaagattcagaaacagtgaaatttgagctgctacagagggcagaacccggggcccactgtgttctttgagcacagagcccagcgtgtgagcacctggagacatcaaggtgcccggccattgtaaactgctcccagccaagcaggcagtcccaggcctggccctgcctatggaggctcccgcaactcagtgcccttgcctgtgccctccaagggggctgcagaacacccttcaggctggtgcagtattaactgcctcactcgtgtagatctataagaaaaaggcagcagcctgtaagaagaatggggaaagggtgcagagagttctcagaaaaaggaaatgcaaatgtctctgaagcaaatgagaagacactcaacctcactctgcaaaagagaaatgcaaattgaaagtaggacaaggtactacaccaggttggcatagatcaaaaattttacctcatagattcctgtagaagtataaagtgccagctcctctagagagagcagtttggcagtatctctcaaaagtgacccggcagttccacttctaggactttgacatccagacataatttcacacatgtgaaatgaaatatacaaggatatccattgtaatagcaaaagattggaatagacataaatgtccactggaggccaccaggtgaatcacttacggcatatccattctgcagaattctactaagccattagaaagatcaaaacagctttatacatacatacatacatacatacatgggacaattcccaagatatagaaccttaaaaaataggaaggaacagtgtgtgtagtacttaggttcaaaaacaatacatattttagaatgaaaagtcaactaccagctgggtgcagtggctcacacctgtaatcccagcactttgggaggctgaggccggcagatagcttgagcccaggagtttgagaccagccttggcaaaaaatcatacaaaagttatctggatgtgatggtgcatccctgtgctcccagctacttgggggagaggggtgctgaggtgggagaattgcttgagcctaagaagttgaggctgtagtgagctgagatcgcaccactgcactccagcctgggtgacagagcgagaccctgtctcaaaaaaaaaaaaaaaaaagttaaataccatttaatgtgtatgtttctgtgtacatacaatatttgtgggaggataaacaaggaaatgggaacaggagatgcctatagggggaggaactgagggattagacagaggagtgaggggagatttccttttccctgcctaccctttggtaccttttgtattttatattatgcattatctggtcaaaaagagattaaattttttgaaaaaaatcttagtcatgctggaggccagagcagctgaggtgctggggcaggagctggagggcagaccttctgcttgttgagggagggtcttcatggaggatggaaaccaccagaaggtgtgcctgtgacagtggaatagtgtgacgggaatagtgtgacagtggaatactgtgatgggaatagtgtgacagtggaatagtgcacgggaatagtgtgacagtggaataatgtgaaagtggaatagtgtgacagtggaatagtgtgatgggaatagtgtgacagtggaatagtgtgacgggaatagtgtgacagtggaatggtgtgacgggaatagtgtgacagtagaatagtgtgaaagtggaatagtgtgacagtggaatagtgtgacggggaatagtgtgacgggaatagtgtgacagtggaatagtgtgacgggaatagtgtgacgggaatagtgtgacagtggaatagtgtgacagtggaatagtgtgacgggaatagtgtgacagcggaatagtgtgaaagtggaatagtgtgacagtggaatagtgtgacagtggaatagtgtgatgggaatagtgtgacagtggaatagtgtgacagtggaatagtgtgatgggaatagtgtgacagtggaatagtgtgaaagtggaatagtgtgagagtggaatagtgtgacgggaatagtgtgacagtggaatagtgtgaaagtggaatagtgcgaaagtggaatagtgtgacagtggaatagtgtgatagtggaatagtgtgatgggaacagtgtgacgggaatagtgtgatgggaatagtgtgacagtggaatagtgtgacgggaatagtgtgacagtggaatagtgtgaaagtggaatagtatgacaggaacagtgtgacgggaatagtgtgatgggaatagtgtgacagtggaatagtgtgacgggaatagtgtgacagtggaatagtgtgacgggtaatagtgtgactggaatagtgtgacagtggaatagtgtgacgggaacagtgtgacagtggaatagtgtgactggaatagtgtgatgggaatagtgtgacagtggaatagtgtgatgggaatagtgtgacagcggaatagtgtgacagcggaatagtgtgacagcggaatagtgtgacagtggaatagtgtgatgggaatagtgtgacagtggaatagtgtgatgggaatagtgtgacagtggaatagtgtgaaagtggaatagtgtgacagtggaatagtgtgacgggaatagtgtgacgggaatagtgtgacagtggaatagtgtgaaagtggaacagtgtgaaagtggaatagtgtgacagtggaatagtgtgatagtggaatagtgtgacgggaacagtgtgacgggaacagtgtgatgggaatagtgtgacagtggaatagtgtgacgggaatagtgtgacagtggaacagttgaaagtggaatagtgtgacaggaacagtgtgacggggaatagtgtgatgggaatagtgtgacagtggaatagtgtgaaagtggaatagtgtgacagtggaatagtgtaacagtggaacagtgtgacgggaacagtgtgatgggaatagtgtgatgggaatagtgtgacagtggaatagtgtgatggggaatagtgttacagtggaatagtgtgacgggaacagtgtgatgggaatagtgtgacagtggaatagtgtgacagtggaacagtgtgacgggaacagtgtgacgggaatagtgtgatgggaatagtgtgacagtggaatagtgtgatgggaacagtgtgacgggaatagtgtgatgggagtaatgtgacagtggaacagtgtgacgaacagtgtgacgggaataatgcgacgggaatagtgtgacagtggagtagtgtgatgggaatagtgtgacagtggaatagtgtgatgggaacagtgtgatgggaatagtgtgatgggaatagtgtgacagtggaatagtgtgacgggaatagtgtgacagtggaatagtgtgatgggaacagtgtgacaggggaatagtgtgacagtggaatagtgtgacagtggaacagtgtgacgggaacagtgtgacgggaatagtgtgatgggaatagtgtgacagtggaatagtgtgacaggggaatagtgtgacagtggaatagtgtgacagtggaacagtgtgatgggaaaagtgtgacgggaatagtgtgacagtggaatagtgtgacagtggaacagtgtgacgggaatagtgggacggggaatagtgtgacggggaatagtgtgacaggaatagtatgacagtggaatagtgtgacgggaatagtgtgacagtggaatagtgtgacagtggaacagtgtgacagtggaatagtgtgacagtggaacagtgtgacagtggaacagtgtgatgggaaaagtgtgacgggaatagtgtgatggaatagtgtgacagtggaatagtgtgatgggaatagtgtgacagtggaatagtgggacaggaatagtgtgacggggaatagtgtgatgggaatagtgtgacagtgtgacagcggaatagtgtgacagtggaatagtgtgacaccggaatagtgtgacaggaatagtgtgacagcagaatagtgtgacgggaatagtgtgacagcagaatagtgtgacagcagaatagtgtggcagcggaatagtatgaccggaatagtgtgacagcaatagtgtgacagcagaatagtgtgacgggaatagtgtgacacagaatagtgtggcagcagaatagtatgaccggaatagtatgatgggaatagtgtgacgggaatagtgtgaccggaatagtgtgaccggaatagtgtgacggggaatagtgtgatcggaatagtgtgacggggaatagtgtgatgggaacagtgtgacaggggaatagtgtgacgggaatagtgtgacggcggaatagtgtgatggtggaatagtgtgacagaatagtgtgatgggaatagtgtgacgggaatagtgtggcggcggaatagtgtgacggtggaatagtgtgatggggaatagtgtgacagcagaatagtgtgacgggaatagtgtgacgggaatagtgtgatgggaatagtgtgacggcggaatagtgtgacggtggaatagtgtgacggggaatatagtgtgacagcagaatagtgtgatgggaatagtgtgacagcggaatagtgtgacgggaatagtgtgacggtggaatagtgtgatggggaatagtgtgacagcagaatagtgtgatgggaatagtgtgacgggaatagtgtgatgggaatagtgtgacagcagaatagtgtgacgggaatagtgtgatggaatagtgtgacggtggaatagtgtgacgggaatagtgtgacaggaatagtgtgacagcagaatagtgtgatgggaatagtgtgacagtggaatagtgtgacagcagaatagtgtgatggcggaatagtgtgatgggagtagtgtgacagtggaataatagtgagccatggttggcctttcccttcatgcactggcgaccaatagaatcaaggcagtccccatttctacacgtccttagccctgtctgttcctgtgtcctctccaccggctctcagtgttctagaacccacaccatgaatgcctgggtccctccctccactaaactgtagctctccaagggcagaagccagttctgtcatcccatgtgccctggctcttggcatagtgcccagcacacagaaaaggcataataaatgttgaatgaatcattcattaacatcaggaaacaccctggggttctgatttattgttttacatcagattcttttctccctaccccaactgaaaggcagccttttaatcgctggtatcccagcacttagcctactgctctgtatatagtaggagctcaataagtgttgaatgatgagagtcgcatgatggttagtttatcttcagatcagattgttcccagccaaatggcaagaacagagccatatcttccccatggaatgagtacagtgcagcccctaggaaggaggtgggaggctctgcaatgggaagggttccaacagcctaggtcagtactcctcccaagggtgatgtcagagatgtaccaggggcacagggagggtactatcacagttccttctttggacatcacctcaagctccagtttttgggacacgggaagaaattcagatctaagccatagggctgacccttgtaggcactaccccatcactttagaggaatcagagaaagcccattgaaggaggctggttccacgtcccgaactgacccaaaaccaaagaagcatctggaaactctgcaaggactccatcatgtaaatattgtgctctgaggtcacaaacataaccagccagaagctgcggcagctgaggccccttccccggaggccaacaattaaccccatgtaaagattaccaggaagagaataaatagctgggaaaagtttcccaaaggatcccagcctccctgccactccagctgcctgaacagaaagcatggaggaggcagggagggtgctaatgcctcattagtgattgtcgcaatcactgagatcctggctgtcttgactggcttctcctctgatccatgtcaatggcgccctgttctgtctcctctgaccctgtagacaattggttactggtgtttgattctgagcagatcagccagtgaagaggaaattcttccctgtgagctcctgcaaagtgtaggaaatttaggcagcccagtgagcagggctgctgtgagagggactcttgctggaggtgcagaggatacccatcccagcctgggctcggagcacccaccaggacttgcctgttgtcctgggcagacctgccgttgattgtggcaacagaggttccctcagagcagggtctgtaaggcacaaaaacgtctttctctgtaaccgaagtggaaaaaatgtatctgagtcactttatacgtcaggtaaatatcctcatgagtacgtcatttaaaaatttgccatttcctctgacgtttccacagtttgctagaacactgccttctgctccagttacagacaaatgcccctcctctccctgcttctgcagtggtcttttagcttattccttggactgactttctggggggaggtaaggatgatttgaagacctatattttataggactgtaacctcttagaattacaagggacctttgtagggatcatctggtcccgccttctctcggaggcagatatctgcaatggatgccttcctaacagcttcccaaactgcccagatgctgagtgattccaaacaaagatgcccactttctgttcggaggctctaaatgttatatgttccttttgacagtagccaaaatccatctcctgtcacttccatccattggtcctggttctgccttctagagtgacatagactaagtccatttccctttccaggtgacctcatggtctttttctaggctacacttttatttatcttcatgtccccatgtggagcccttctagacctcccatagaagagcccttctagacctacatagaggaagtggcggctgtgtgacagtgtcacttgtacggcatggcacctggagccactcagcctagctggagtccacagtcacgcatgtgctttctcttaccctcaggctgagcacacatacccccccgtccccctgccctttgagcctcttgtttcccatgtggcctgagatgacagcagcagtgatcatggctcctctccagggccaggcagccgtgctcatcccctgctccccaatggctccatagccttatgctcctgcaggggaagtgggtcacgccaggaagagcagctatagcgtgagacagcccagtgcctctccgctcaccgtcagcagagaacccttggtcgccagggtttccacgtgggtttgatggaggaagggtagagatgtggggtcttctgtattccttttctctgccctgaacagtgatataagagcccttgccccatccccaggcagctctcatgcttctttagcagagagggcccccagactccctgacatcccagtgggcctctccctgtgatgcctcttcctggtgcccaggaccccctaaatgccctgtgcttccaaggcatggcaaactgcttcccctccaggggctggctgctggggtagatgtggacagcgccaccactgtagcatctctgagcttggatgcctctacctgtgttccccacaccccctcttgtacaggacctaggagatgagatgccttttccaaatatcatttgtaaatgttggagccacatttttttccaaactaatatcagaactgttctgtgctccagtcaagttctttttgaagaaggtagctcaggtggttaaaatgagcactagtgagaccaaatctatggcctcaggagccttcatgagaaatggctccacagccacctactgcaccacaggcacagcctggcctgctcttaggcaggaggaccaggggagacagtggggatgcctctggacaacctagtccactcctggatgaagagcagcagctgctgctggaagattatgcacagaaaactcttgctccacaatacctccagctttcaaccagtcccaatcttcagtgtgttgatgagcaaaatagactgcagtcacagtgggcacatggaggtgagaacaaaggcatctttgacaggcaggaacatttccttccccttccagagcagtggctggcaatcctagctcatcatcgcttctgagagctctgggaagagctgctgtggccatggctgctgcccccgggaacttggctttatcattctgttctttgctcagaaattcaagtcaagtaatttagaattctttatccaacaactgctctaggaaaagaacatgtcagaagcatttgctgacatcacctttgagatgttcacgtagtttaggcatcactctctttcctttccctttcagctctttatggcattttcatttggtggtggtagaagagtgggtgtgtggagtgcattcctgcccttccctcccttggtaagtccaggtgtttagggccagtgtgcgccagatgcctcttctcccaggcacttccacaagtgtagaggatgcctagactgtgggcacttccgtcaattgactatgttgcacaggcttggaaaatgagggccaaatgtacacagaggttgtggtcttgatcagaggttttgccacaactattatttttaatggcctgaagcatggatctggcagtcttatgaatgggtactctgaagtcaaccctgtgttccttcagtctcgtctttgtttattcattgaccattttaccatgcatgccctggttctagggacgtaggaagaaagaaggcaagttcataggctctcagaccgggttctacctcccatcaaaggaggaatctcctcccttatgttccggcccacatgctgtcctgcccctgcccaaggaagctcagtctctcgagctttcattgggtgtccagtggcccaagtgtcccttttcctcccagcatctactctttcctcccagccctgcccctgagggtgctcagacctcttgacatcactcttctaaagtagacttttatatatttgcagcaactatcttgtcttctgcagagtcttatcattcccaggtagatataagttcatccatcaactgctacttccatatcatgttccctcacttctgccactccatatttgtatagttggattaaaaaacaaaatctgagttcaagtcctggatatccttgttaaccttctgtctcattgatctgtctaatattgacattggggtgttctgtaccaagcagacctaatagacatctacagaactctctaccccaaatcaacagaatatacattcttctcagcaccacactgcaattattccaaaactgaccacatagttggaagtgaagcactcctcagcaaatgtaaaagaagagaaatcacaacgaactgtctctcagaccacagtgcaatcaaattagaactcaggattaagaaactcactcaaaaccgcacaactacatggaaactgaacaacttgctcccgaatgactactgggtaaataacgaaatgaaggcagaaacaaagatgttctttgaaaccagtgagaacaaagacacaacgtaccagaatctctgggacacatgtaaagcagtgtatagagggaaatttatagcactaaatgcccacaagagaaagcaggaaagatctaaaatcgacatcctaacatcacaattaaaagaactagagaagcaagagcaaacacattcaaaagctagcagaaggcaagaaataactaagatcagagcagaactgaaggagatagagacacaaaaaacccttcaaaaaatcaatgaatccaggagatggttttttgaaaagatcaacaaaattgataggccactagcaagactaacaaagaagaaaacagaagaatcaaatagatgcaataacaaatgataaaggggatatcaccactgattccacagaaatacaaactaccatcagagaatactataaacacctctatgcaaataaactagaaaatctagaagaaataaattcctgatacatacactctcccaagactaaaccaggaagaagttgaatctctgaatagaccaataaccggctctgaaattgaggcaataattaatagcctcccaaccaaaaaaagtccaggaccagacagattcaccagaggtacaaaaaggagctggtaccattccttctgaaactattccaatcaatagaaaaagagggaatcccccctaactcattttatgaggctagcatcatcctgatatcaaagcctgccagagacacaacaaaaaaagagaattttagaccaatatccctgatgaacattgatttgaaaatccccaataaaatactggcaaaccaaatccagcagcacatcaaaaagcttctccaccacgatcaagtcagcttcatctctgggatgcaaggctggttcaacgtatgcaaatcaataaatgtaatccagcatataaacagaaccaatgacaaaaaccacatgattatctcaatagatgcagaaaaggcctttgacaaaattcaacagcccttcatgccaaaaactctcaataaaataggtattgatggaatgtatttcaaaataataagagctatttatgacaaacccaccaccaatatcatactgaatgggcaaaaactggaagcatttcctttgaaaactggcacaagacaggggtgctgtctgtcaccactcctattcaacatagtgttggaagttctggccagggcaatcaggagaaagaaataaagggtattcaattaggaaaagaggaagtcaaattgtccctgtttgcagaagacatgattgtatatttagaaaaccccattgtctcagccgaaaatctccttaagctgataagcaacttcagcaaagtctcaggatacaaaatcaatgtgcaaaaatcacagcattcctatacaccaataacagacaaacagagagccaaatcatgagtgaactcccattcacaattgcttcaaagagaataaaatacccaggaatccaacttacaagggatgtgaaggaccccttcaaggagaactacaaaccactgctcaacgaattaaaaggggacataaacaaatggaataacattccatgctcatggataggaagaatcaatattgtgaaaattgccatactgcccaaggtaatttatagattcagtgccatccccatcaaggtaccaatgactttcttcacagaattggaaaaaactactttaaagttcatatggaaccaaaaaagaaccctcattgccaagacaatcctaagccaaaagaacaaagctggaggcatcacgctacctgacttcaaactataagacaagactacagtagccaaaacagcatggtactggtaccaaaacagagatatagaccaatggaacagaacagacacctcagaaataacaccacacatctataaccatctgatgtttgacaaacccgacaaaaacaagatatagggaaaggattccctatttaataaatggtgctgggaaaactggccagccatatgtagaaagctgaaactggatcccttccttacaccttatacaaacattaattcaagatggattaatgacttaactgttagacccaaaaccattaaaaaaccctagaagaaaacctaggcaataccattcaggacataggcatgggcaaggacttcatgactaaaacaccaaaagcaatggcaacaaaagccaaaattgacaaatgggatctaatcaaagtaaagagcttctgcacagcaaaagaaactaccatcagagtgaacaggcaacctacagaatgggagaaaatttttgcaatctacccatctgacaaagggctaatatccagaatctacaatgaactcaaacaaatttacaagaaagaaaaaaagaaccccatcaaaaagtggacaaaggataggaacagacacttctcaaacgaagacatttatgcagccaacagacacatgaaaaaatgctcatcatcacaatgcaaatcaaaaccacaatgagataccatctcacaccagttagaatgacaatcactaaaaagtcaggaaacaacagatgctggagaggatgtggagaaacaggaacacttttacacttttggtgggagtgtaaactagttcaaccattgtggaagacagtgtggtgattcctcaaggatctagaactagaaataccatttgacccagccatcccattactgggtatatacccaaaggattacaaatcatgctgctataaagacacatgcacacgtatgtttattgcggaactattcacaatagcaaaaacttggaaccaacccaaatgtccatcaatgatagactggattaagaaaaggtggcatatgtataccatggaatactatgcagccataaaaaaggatgagttcatgtcctttgtagggacatggatgcagctggaaaccatcattctgagcaaactatcaccgtaaacaccacatgttctcacacacaagggcctgttggcaggtgggtggcagggggagggtagcattaggagaaatacctaatgtaaatgacgagttaatgggtgcagcaaaccaacatggcacatgtatacatatgtaacaaacctgcatgttgtgcacaggtactgtagaacttaaagtataatttaaaaaaatttaaaaaattaataaaataaaatctgctaagtttagctgtttttatcttattcaattttaacttattagtgttagttcatcttcacagcctacctagtttttggaaatcctgtctctgttatctttgttgtcactgagccttttgtcatctgcacaattggatcccagagctgtggagctgaacataagttgtaggggaggagcgtggtggccccagagtttgccctcagccttcggtggcaccttcacataaggcctcaaatgaagacgcagactgcctatggcaagaatccaggctgcctgtctgaatgctaagcacacagtaggtgcttcataaatatggatgtgggtgagcggttgtcggggtgtctgacaagaagcctgattcgtggtgtgccatccctgtttcaggaaagtgacttctgtgagctcatttgctaggcagcgtccactgtgttttatagtgtggtcatgaattaataatgcacaacactcctaattaggctggaataaaaacacaggttaaagaagagaaacagctggggaagtgtgttatgactgtgcagcctctggctccaggggcctgatttggggtatagcaaccactgcagtggacagttttctggaaagcaggtcccctacctagttgtccctggagagagaaaatatttgttttttttcagcaccccttctgcttgtgctgtcagaataagaaaaagtggctctggctagttctcctccccactccctgcatttcaggtggaatgattttacttcatggaagtgagtgctttagtaagtgcttgcctgcagagcttgcatcgggagttagggaaggatgaaaaatgcagtagaagttggcctcatcaggatgtgaaattgactgtgaacagtgtgatttattaaagacaactgtttgtgctggttaaaatgtgcactcagctcctagcaaggatctcttgctcagaatggaggaagctccctgagggtggtcccagctgccccttcctctgtctctccttgccaaatcctcttgcaggctcagcccttagcaggggccatataattgtggctttaacagttttaataaagggtcatgcaggcactgggaacatgctcttcaatgctcacagtctaaattaggcactaaccaagacaaaggatataagcgtgctcatctatgctttctctgtctcccaccacagcgacaagaaagggcggccccaggagatggggggaccgagtgagtgagtgctagctgaggtctgaaaacaccatcctgaagcttctccctctctgttaccttgagcacctggagtagggggatgaaatgagatttgaaggccaaggatttaaaggaaaagaatcctggccagcaacgttcaccatgtgacctgaagcaagctgctgctgtctgagcttcaatggtcaagtgtactgtggagccacacagccttgagttctaatgtccaatgagcgtttagaccttgggaaagctacttctctgagccttagtttccgtatctactaaatggggctggtgacacctgtgtgataaggtggttgtgagaatgagggatgtacccagccaagccacatgtaatgctcagtaaatgtctgtctcctctgctccatgcgtgagcacccaatttagtagaatgcccttccccctgcagattcccctacaacagtagttcccaaagtgtggttctcagaccagcagcatccacatcacctggaacttgctagagatgcagattctcaggcctaccccagatctactggatcagaaactgtggggtggggccctgcagtctgcgtttcagcctgtcctccaggtgattctgatgcagacttgctgttctgggattttctgcttcaatttcgaatagatgacaaccatctagtcctttctcctgagaggacgtgaaagtgaaagtgacagctgaccattttttgaaaaaactgtgaggcctgaacaccggggtttgagttccaggtatgtaaactctgtgagggtaaggaattatcattagagccttaaggtagcaaaagcctgttcttcaaagcttctgtccatctcccccacgtttggagttagatccagtggtttataggctcagaagcctgaggcagctttgctgttgctgtgtatcttttgataagataaccagccctctgatgggagaaggctcctgcctcataggcttattaagattaaaactctaaatttagctctggaggaaggtctgcaggcttagggccatttgatgaatgactccatgatatctccagactgcaactactagagtaaataagatttaaatacagctgccaagccaccttatcatttccccctatcagatctgaacatggttaaactaagtgctgtcagtgccagctcagtgaatgaaggcagcagtgcataaagtcattctgaataattaatgagataatggttgtgaagctggtgggatggtgcagagagtgccagggcagggccagtgtgtttccagatccggtgtcagcaccctaggtctagggtctggtgcatgaggcagttctttaaggaaagaagcactcatcctccagtggcctcaaaatagaaaatgccaccaaagcagagatatgtacatacagttaggggctgatattcaggatatctaacaaatggcagggcacaggcatggaccagtggatccaaagagatggtggccaagtgcaggagcaggcccttggggcctctgcagaaccacatgtgacccctctttttgtagcagaagacaagtcatgagggagaggccaggaccatggcttttactcactctagggtagcatatcattcttttaatgtcaggtatagtctctctgatgcacaccagctgagtgtcagccttgagggcacatgctgaggctatgctcagggtcagtgagagaggcccccaaattcatcagtcaccaagtcttataaatccctctttggcagcatctcctggagtcgcctctttcccttcattctacttccccattggatatatccctctctgagccagcccattagtaaaccctctggaggttgaaatttatcagtttcatattggtcttaaccaggttggctgtgtgggctgttacatgtgcatagtgcaccccatggacgtggatggatatgttggtgacatttaagaatcatattaggttggtgcaaaagtaattgaggttttgccattgaaagtaatgacaaaactacaattacttttgttccaacctaatatatccttcacatttgcagacgtaggctttgaccaagaagagtttgtcttaggaggtgaatcttgttttctttacaacctggtggttcttaggagtgatgggaatctcctctctttccttccttagaatggttttgagtcactggggggacattactctatgggaccagaaagtaagaatctatcattttagctgaaaggacccaagagccaagctgggaaggtcatagcgctgttcagccctcagaactgggaaccagaaagttgatgactgcacagtggatgagccagagggacagcaggcagtggggtgctggagcctctagctagaaaacttgccttggtggaaggagggaggaagttaaggcagtattaatgctagataaatcgtggataatggtagatttaaaaaactaagggacagacatcattcagactgttttccacataggactcaacctgccaccctgggcttgggatgtggactctgggcctttgtgaggtgatgtggcttcaagcaagaatatcactattggattgaaatcaaaaccaaagtttgagaatctgctagctgggtgctctatgacaagttatttacctttctgagcctcagtttctgcctcttaaaatgagaatagtaatttctacctcagagtgttgtaagaattaactaagattgtgtattctttgttgtaaatggtgtagtagattgcatattctttgtagaccatttgcatgtagacagagactatggtgctgggtggctaggaagaaagcttccctgaagtttgttcatgtgctggccatcagccattgtcttctaaaaatgggtaccagtaggatgtggtctttgaaacagccctgttagagacaagatggtggtcacagactcgggagtgctgcccagcctgacagccaagtgagcctctgatggggtaattgatagctcagacacaattcagcaactcaattaactcatctcccattaggatggattgatttcttccttgggataggaatttgtgctggttcagcaacagcagccttcccactgctgaatgcatctgtgtggttaagaaagcttttccagtcctactgccccacagaggcctcaggggaagaaggcgtgattaggggagcccagtgttcagtcctacacatgataagtccccctgcccctaggaagatgaaggaccgaaggtccatcattattttatttttatttttattacatattttttttagaggctcactctgttgcccaggctagaggtgcagtggcacaatttcggcttgctgtaacctttgcctcccgggttcaagtgattctggtgcctcagcctcctgagtagctatgatcacaggtgcacgccaccacgccctgctaatttttgtatttttagtagagaccaagttttgccatattggccaagctggttttgaactcctggcctcaagtgatttgaccgcctcagcctcccaaagtgctgggattataggcatgagccaccatgcctggcctaccatcattttaaaaatgaattctggggccaggtaccgtggctcacgcctgtaatcccagcactttgggaggccgaggcaggcagatcactaggtcaggagaccgagaccatggtgaaaccccatctctactaaaaatacaaaaaattagctgggcgcagtggcgggtgcctgtagtcccagctactcaggaggctgaagcagaacggcgtgaacccggaaggcagagcttgcagtgagccgagattgcaccactgcactccagcctgggcgacagagcaaaacgtctcaaaaaaaaaaaaaaatgaattctggtctgggcactgtggctcatgcctgtaatcccaccactttgagaggccaaggcaggtggatcaccttgggtcaggagttcaagaccagcctgaccaacaaggagaaactctgtctctactaaaaatacacaattagctgggcatggtggtgcatgcctgtaaatgcagctactcgggaggctgaggcaggagaatcacttgaacctgggaggcagaggttgcggtgagccaagatcgtgccattgcactccagcctgggcaacaagagtgaaactccgtcaataaataaataaataaataaataaataattatgttttctcacatcttttgtctgaacaccctgaggcataaaaagcccaagacattgcaatgcttaatctatgattaatgctgcaaatctatgatttgctaacatcccaatgttatctttaaaattttcaaatgtcagcttcattgagacatagtaaatgcatcattcaaggtatacaattggctgaattttgccagttttatacacccttgaaatcagtctcacaatcaagatataaaacatcatcatcccaaaagattcctagggcccctgcacaacctgtcgccgcccagccccaggcaaaccccgatatgctttttgtaactgtaagtatacattttatataaataatatatactgtattattttgccaagggcttcttcactcagcatagttttgttgtcatggtaaattacacaaaacataaaatttaccattttaaccatttttaggtggcattaagtacattcatattgttatgcagtcatcaccatccgtctcgagtttttttcgtcttgcaaaactgaaactttatacccattaaacactgccttctcatttcccctctcccttgagcccctggcagccatcattctactttgtgtgtctgtgaatttgattactctacatatttcatagaaattgaaccatatagtattcttttgtgtccggcttattttacttaatatgatgtctttagggttcatccatgttgtagcatgtgtcagaattccttccttttaaaggctaaataatctcttgtatttttacaccatgttctgcttatccattcatttgttgatggatacttgggttgcttccaccttttggccgttgtgaattattctatgaacatggcatacaaatacctcttctagttcctgcttcatttcctttggatattggtgtggtttggctgtgtccccacccaaatctcattttgaattatagctcctcaatccccatggtcatgggaaggacccggtgggaggtagttgaatcatgggggtgggttttcctgtgctgttctcaggaatagtgagtaagtctcatgagaactgatggttttataaagggcagttcccccgcacatgctctcttgcctgccaccatgtaagatatgcctttgctcctccttcgccttctaccatgattgtgaggcctccccagccatgtggaactgtgaatccattaaacctctttttctttataaattacccagtcttgcatatgtctttattagcagtgtgagaatggactaatacagatatgtatgtggtaattccaggtttaatttttggaggtgcctccatactgttttccacagtggctgtaccatttcatattaccttttatttatttattttttttatttttctgagacggagtctcgcactgtcacccaggctggagtgcagtggtgcaatctcagctcactgcaacctcctcctcccaggttcaagtgattctcctgtctcagcgtccccagtagctgggattacaggcacctgccaccacaccccgctaattttttgtatttttagtagagaaggggtttcactatgttgaccaggctggtttcaaatgcctgacctcgtgatccacccgcctcggcttcccaaagtgctgggattacaggtgtgagccaccgcgcctggccacacattaccttttaaagaaggtttttcactggacctgcttcttgttctgattatcctttctcttttcagaaaacataccctttgacttcacatggccctgtgtgctgatgctcttttccgtcagtatcaaaccgcaggctttccattcctttcagactgatataattgctcagagaattggtcagccataataacgccaagtaaagttattacttagttaattaaccaagttattacttggttattacaatttaatgctgaccttctcttcgcttcagccatttccctctgtgtcctacctgtttctcattagctgtagttattatacagctcactgatatcctattaacaatgtcatgatacaaccacctacatcctattaactctacctattatgccacctacattggtcctcttaattgaatctattgtgccatacatcctagttatctgcaattagctatatctgtcaaataatctgtcctattaattatattatccaatctcttgcaactgttgtctgactttctgggaacctgttcatatatctttgacgctacctggctgtgatctgttaaaaactgatcacctgtttagatcttgttagatccagatatcaaaagccctgcaggaaattacacatattgattctggggacccagccttgaatgtgcagagtgtgtagggggcttcagccctaaagtacactcttaagaaggatcttttcctttgaccaatagcatactgcccaccaggcagtatgagccacattaatggggagagagacagagacagagaatgtgagagtatgtatgttgggaggatgccttgtgggaagaatggggttggcataaaaggaatgggggttgggagtctcactcctggtggagaagggaaagcctggaaggagaatacccagtggggaggggtgcatgggtgggggacagtggactgcagggggaggaagtcagagtttgtcagggcagaaccctttttgacaccaactttttttgttagtgaccaacaagcctgcatgactgtgtaccatagcagcccttggaatgttgccagaatgacagcttctcccctttgctttccagccttaccattccactgttatttgagctgctgatgaagatgaggctctgccccaagcctacccctgcccccctgggccacatcagtgcttgcttagcaggcccacagtcagagaccttgtgtctacaggccaccaacaagagagagtcaatgcctaggacagggccaggcatatagcaagggcttgtgaagtagttggctgagtagtgctgaagggtgacatgtagaatctgtctcttctggaagaggtgtggtgttgaccggtccccttgcctgtgtgtctgagccacagtgatgggagctctgaaggcctccagggaggatgggtccatctggaagctcagggacagtacctaactgcattgggataaatagtattcctcccggaattcacgtggacctggtacctcagcatgtgacttcatttggaatcaccattcatgatgattctgtcatcacaaatcttactcctgaggttaggaaaggataaggagcccttgacagctgtctggtacatgccacgtctactgtctgtaggaaggtgtgtgctttaaaaagtccagtgagctgtgggcatgtaacaattatcaagtggtcctatattaatcttttgtatttctaaaacactttgtgaaagcactaccaaatctgtgatcttattttatttgcatgcttttaaaaaattactctgagctgtcattgtgtagatggggaaactgaggccctagtagggtctcatagcacagtcaggattataagtctcctaagtgctatctagccacctctctggatggcatatacagtaagaatggggagaattttcacaacctagctatggcccgtgctaaacatgtctatgcctcacctctgggcagtcttggggacagtcttccttacagccctgtgtgttacgcggaagctttcacagggtgtcacttgatagccacgggtgccaagcagagctgtgcaatgccccaggcctagcattgtgtaaatgaaacatccccattggcccatcttcacagctggcctctgggctccatgtttaccaaacactgctgatgcctcactccaaacacagctggagtccaggagtgctttctgtgtccaaagcccgctcccctcatcctgctccctgaacccactgaggagcaggtgttggccggtcccctggcatctgtgcctgagccacagtaatgagaactctgagggcttccagcaggatgggtccatgtggaagttctgggaaagtacctggctgtattgagctagtgttcccctgcaaattcatgtgtacctggcacctcagaatgtgacttcatttgggaataggttctttatggatataacttgtcaggcatcttgagaggaaatcctcctggatttggagtagcctttaaatccaatgattggtgcccttgagaggacagagggaagaaggctctgtgaaaatggaggcagtgatgctgccataagccaagggatcctaggagccaccagaagctggaagaggtaaggaagagttcctgccaacaccttgatttcagacttctggcctccagaactaagaatacatgtctattgttttaatctactaagtttggtaagttgttatggtagccacaggacacatactggctgcctagcaggaggtggagctgtggggctggtcctggagccaggctgccaggggtcgtctgctgccctcacctctcttgcctgcagggcctgggagaacactgtggaaagccaggctaaggcgcaaggaagaccagggcttgacttccctgttgtcactctaatcttggtagagaaagacttctgtgccctcccaccgttactattactacctttttttagttcccatgctatgccaggcactgtgcaagtctttacatcatttcactccatccttataaggacactattcagtaagttgctgtatccctagtttttcatttgagattcattaacttgctcaaggttccacagctggcaagtggcagagccagaatttgaactcatcccatttaagagcctgcacatataccactatgctacagtgacttccccatgccatattaataatcatgacagctaatggttgacataacaagaagagaacctgtaatcacccccaggggcttcccgcagcctccttcctattcctaccactgtctgtctgcctgcctcctccctatgcagcagccacgtcacatgatccccgttccttggatggcctataaggtggtcttcctctagtagctgggccctgtcccttcccatctgacaaactcttgctcagcccacgtggcccagtttaaatgtgctctgtgcattccatcatctagtgcttaccacatgatcataaatcccactggtgtatgtgtgtgtctttcccaagttggagtgggagtgcctttgacatgggactgtgtctttccctttcggcatcttgtatcttccccagcatctctggctctccaaagcccccagtaaatgtttgagtaagtgaaacatgcagaagacatgaagattgttaagtaacaaatactcagcagaaagggctgttaattttaaaaaaagaagaaaaagaaaagaacatcagatattctaagacaagtatttgtagagggaatcactaaaagctttcagttttgaaagcaaatatttaatttaggctcccccttctgtgtgcttacaaatggcactaaattcagtataatgcttaatctacattttgagatttactatgggactcatggactttaagaaaaaaatgtagttcattgtaaatgcctacatttcacagtcattcgtttcttttaacacacacaattggattgacaaaggtaatgacttcctagctagccatattcaaaagaaatgtcaaaaatttaaatttataaagctctctgtgaaatgttgtgatgccccaatcaaatgaccctcctgatcttgcccggcaccctttccctcttggctgctggcgccttcctgtctcattgccaaggacaagccacgtctgcatgtctctatcccacccctcaccacttagaattcttgaaacctctggggaggctgaccaagaaggacagaggaccctatatttgggcttctggaacctaagtgccccagggctcagagctcctattagtgttatttcacatttactacaagtttaaaaaaaaaaacacacaacggtgatgatgacggtgatttttgtgtcttgtccatgaatcacacaatattattctagggggaaacgtaccctgatttcaaacaactcatctaaaagtacagattttggaacatgacctacatgtttacagtgccacatgagactacactcagactcatggacttttttcctttttcaattactaactgctttagtcctctaaacgtggattcttctttttttttttttttaaaccaatactgggtctaactctgtggcccaagctggagtgcagtggcacactcatagctcactgtaacctctaactcctgatctcaagtgatccttcctccttggcctctcaagtagctaggactacagaaacatgccaccatgcctggcttatttattatttatttatttatttatttatttatttatttatttatttatttatttatggtagagatgaggtttcactatgtttcccaggctggtctccaactcttggactcaagtgatcctcccacctcagccttccaaagtgccgggattacaggtgcctggctctaaacatggattcgttaaaagcttgccctatttctttttttttttttttttttatactttaagttttagggtacatgtgcacattgtgcaggttagttacatatgtatacatgtgccatgctggtgcgctgcacccactaactcgtcataaacatggtttgtgtttgcaatagtgcactcctcattttatgctgactctgatgggaatgtaggactcaattgctgaagttgtcattacagcagactttccaggaggcctttgttgtttgtcaggttgccttctccaaaaggggacagtttgcccatgtgggatgtcctgccccaagcatttctaactgctcttccatctctgtcctccctctgcaggctggccttgggtgaccctctctgtcctgggattcctgtactgctactcccacgtgggcattgcctgggcccagacctacgccacggactaatgctgttgggcccaggccagtccttgttgctggcctccaaggcaaatagtgcttcaccctgacctctcactccaggacagcctctaagggatttgatctgctcatcttcagttgaatgccctcactccaagactggatgctggatctcatagaaaattcacagccagacaatcttctaatctggagtctttgagatcttctaccccaactcatcattttcctattgaggaaacgggtccagggcagtcgtgtgtcttacccagctacacagggtgacattttggtctagaacctagtctcatgagccctttgcattctttccccttaagcaagaatagaatgtagtggaaatttattgattgagacacagaaatcctgattagtgataggcctgtcttctgggcaatatttctaaaatatttgagtgacattgatgtttaagtgacctccttcatcacatcctgcagtatctccagaagcagcactagggtttgagtttcatgcttcagcccctctgtaggaatgagaccaagccacagctgtcttttgaattacgtagtcgaagaagacggtagcagccctgtagcattctaaggcatctatacccaaggagtcctgtgatttgagcttcagcagggtgatctacatttgggtgcttgtttctgagatttgcagagaagtataacatggtagttcctctaccttacagttaatcgtttcttaataaagaagcagaatttagaaaccacaggatagtgtacccacagatgggtgttatcaaggccagtcatgaggatggtgtcctggagtcttgtccaccctctccatacaagtctcaaaagtcatcctcctactcagtgattcacgtttagtggtttatattattaaggtttgattcaaacagagccttttctgtcctgtagataatctacatgtttgtagaattattttgaatatgtttgaggaaaatgtttaaaatctaaatatactcacataacttgattattcactcctctgaaaagatgctggataggctaccaaagttcccaagtggtagataattcagaagacttgtttgaatttggattttttttttttttggagtggggaagggtataaaggaggcttaaaatttgaatccataatatatctaattacaggagaatttacaacatctcaagtacgtaaattaagttgtcattgagtgaaaggttcacttggacctagtgctgcctcctgtttattacatagcatggcccttatgtcttgagttgaggttatcatctcaatgaggcttaagctcctagagtacaggaccattttgttgattgtctttcttcatagcttctctgcttggcaaagagatgggagggggccagatactgactacctggggtaggcacattatgtgttaaagcaagacagaggccagagaggggcaggtagacctgcatagcagcagcctcagcagctgtcttggtaaaggagagagagagacatggggccagtaattccggggtgctcagaagttttaggagggaatgagcctcagggaggagtgagcacctaaatgaacgcagtaaaccttcatggaccaacagtgattgaggatttgtgggcagccagagggagtctgactgaagtttacttggaaagaaagggcttgctaagaaaaaagggagtaaaaatgatgatagggaagtgtctaatgtatgtgcacatataagtaatacaaaagttttgagctcttccaagtataccatttatatacaaacaaataggtttattcattcattaaactactttggaagcgtcagtggatatatttgaaagtggtaatcctgaatctcttttaaactattatatgattcataatggttctcaggaattaataaatgattactgtgtttagctctgta

SEQ ID NO: 365 - DNA, 4359 bp, Homo Sapiens
acaattcataaagtttattctatttgatcttcactctaatttacaaagaaaagcagggaagtctatttctgttttacagaggtgtacagggaggctcacaggggctaagttcacacagtaagccctcgaagctgccagggctgcaaagcccaccctctttccaccgcaccgaactacctcctttcgcctacaaaacgtaggtggggaccactggtgttggaatgacggcccacctcgagtttcaggtgacttccactctgcaattaacttgcaggcagccccagacctgcaatgaacacacgggtgggggagagatatgcacgccagggtcagtgggaaccaacagccgaggggtgagcggggctaggggccccgggccgccggcggggcaaacgcggttcagaaacgcaggccgcgctctggcccgccccctgcagcagcacggcctgctcgccatcgcccggagagcgccgcgggttcccgagtccgggcgcggagggcgcgcgggcacggcggcaggggcgtgctcggaggacgcgcgctgcgctgctcctccaaagggcagctccgggggaaagagggtggcgtcccggggaagcccgcagccgccgccgatgtcgctgggactcggaagtgccgaaagaggggtgttgggaactcgcggcgcgcgtgaacgttgccgtcgccgccgcccgggacagcccggagggcgggacagaggaagttcccggtcgggcgaagaagacaaaagcggcgggggccgcgcgcgcagtgcgcccgggcaaaggcggggatctaggcgccgggacaagtccgcgcacggccctgcccacgtcctctctccttggcttcgtccccagcttccggaactgctgcggggagttgcgaactctggtcctcttggcagtatcggcgaaactctcagcgtaggcatcgggaaccttcgtgccaaggagccatgctgccccgatgggaactggcactttacctacttgcctcactaggcttccacttctattccttctatgaagtttacaaagtctccagagaacacgaagaggagctggaccaggaatttgagctggagactgacactttatttggaggattaaagaaggatgcgaccgactttgagtggagcttctggatggaatgggggaagcagtggctggtgtggcttctccttggccacatggtagtgtctcaaatggccacactgctggcaagaaagcacagaccctggattctcatgctctatgggatgtgggcctgctggtgtgtgctggggacccctggtgtggctatggttttgctccataccaccatctctttctgcgtggcccagttccggtctcagctcctgacgtggctctgttctctcctcctcctctccacactgaggctgcagggtgtggaagaagttaagagaaggtggtacaagacagaaaacgagtactacctgctgcagttcacgctgaccgttcgctgcctctactacaccagcttcagcctggagctctgctggcagcagctgcctgctgcatcgacctcctactcctttccctggatgctggcctatgtcttttattatccagtcttacacaatgggcccatcctcagcttctcggagttcatcaaacagatgcagcagcaggagcatgactccctgaaggccagcctgtgtgtcctggccctggggctgggccgccttctttgctggtggtggctggccgagctgatggctcacctgatgtacatgcatgccatctacagcagcatccccctcctggagactgtctcttgttggaccttaggaggactggcgttagcccaggtgctctttttctacgtgaagtacttggtgctctttggcgtgcctgctctgctcatgcgcctggatggactcactccacccgccctcccccgctgcgtgagcaccatgttcagtttcaccgggatgtggaggtattttgatgttggactgcataatttcttaatcaggtatgtgtacattccagtgggcgggtcccagcatggcctgctggggacactgttttccacggcgatgacatttgcatttgtgagctactggcatggcggctacgactacctctggtgctgggcagcgctcaactggctgggagtcactgtggagaatggagtccggaggctggtggagactccctgcatccaggacagtctggcccgatacttctccccacaagctcgccgtcgattccacgctgcccttgcttcttgttccacctcgatgctgatcctgtccaacctggtatttcttgggggcaatgaggttgggaaaacctactggaataggatcttcatacaaggctggccttgggtgaccctctctgtcctgggattcctgtactgctactcccacgtgggcattgcctgggcccagacctacgccacggactaatgctgttgggcccaggccagtccttgttgctggcctccaaggcaaatagtgcttcaccctgacctctcactccaggacagcctctaagggatttgatctgctcatcttcagttgaatgccctcactccaagactggatgctggatctcatagaaaattcacagccagacaatcttctaatctggagtctttgagatcttctaccccaactcatcattttcctattgaggaaacgggtccagggcagtcgtgtgtcttacccagctacacagggtgacattttggtctagaacctagtctcatgagccctttgcattctttccccttaagcaagaatagaatgtagtggaaatttattgattgagacacagaaatcctgattagtgataggcctgtcttctgggcaatatttctaaaatatttgagtgacattgatgtttaagtgacctccttcatcacatcctgcagtatctccagaagcagcactagggtttgagtttcatgcttcagcccctctgtaggaatgagaccaagccacagctgtcttttgaattacgtagtcgaagaagacggtagcagccctgtagcattctaaggcatctatacccaaggagtcctgtgatttgagcttcagcagggtgatctacatttgggtgcttgtttctgagatttgcagagaagtataacatggtagttcctctaccttacagttaatcgtttcttaataaagaagcagaatttagaaaccacaggatagtgtacccacagatgggtgttatcaaggccagtcatgaggatggtgtcctggagtcttgtccaccctctccatacaagtctcaaaagtcatcctcctactcagtgattcacgtttagtggtttatattattaaggtttgattcaaacagagccttttctgtcctgtagataatctacatgtttgtagaattattttgaatatgtttgaggaaaatgtttaaaatctaaatatactcacataacttgattattcactcctctgaaaagatgctggataggctaccaaagttcccaagtggtagataattcagaagacttgtttgaatttggattttttttttttttggagtggggaagggtataaaggaggcttaaaatttgaatccataatatatctaattacaggagaatttacaacatctcaagtacgtaaattaagttgtcattgagtgaaaggttcacttggacctagtgctgcctcctgtttattacatagcatggcccttatgtcttgagttgaggttatcatctcaatgaggcttaagctcctagagtacaggaccattttgttgattgtctttcttcatagcttctctgcttggcaaagagatgggagggggccagatactgactacctggggtaggcacattatgtgttaaagcaagacagaggccagagaggggcaggtagacctgcatagcagcagcctcagcagctgtcttggtaaaggagagagagagacatggggccagtaattccggggtgctcagaagttttaggagggaatgagcctcagggaggagtgagcacctaaatgaacgcagtaaaccttcatggaccaacagtgattgaggatttgtgggcagccagagggagtctgactgaagtttacttggaaagaaagggcttgctaagaaaaaagggagtaaaaatgatgatagggaagtgtctaatgtatgtgcacatataagtaatacaaaagttttgagctcttccaagtataccatttatatacaaacaaataggtttattcattcattaaactactttggaagcgtcagtggatatatttgaaagtggtaatcctgaatctcttttaaactattatatgattcataatggttctcaggaattaataaatgattactgtgtttagctctgta

SEQ ID NO: 366 - protein, 493 aa, Homo Sapiens
MLPRWELALYLLASLGFHFYSFYEVYKVSREHEEELDQEFELETDTLFGGLKKDATDFEWSFWMEWGKQWLVWLLLGHMVVSQMATLLARKHRPWILMLYGMWACWCVLGTPGVAMVLLHTTISFCVAQFRSQLLTWLCSLLLLSTLRLQGVEEVKRRWYKTENEYYLLQFTLTVRCLYYTSFSLELCWQQLPAASTSYSFPWMLAYVFYYPVLHNGPILSFSEFIKQMQQQEHDSLKASLCVLALGLGRLLCWWWLAELMAHLMYMHAIYSSIPLLETVSCWTLGGLALAQVLFFYVKYLVLFGVPALLMRLDGLTPPALPRCVSTMFSFTGMWRYFDVGLHNFLIRYVYIPVGGSQHGLLGTLFSTAMTFAFVSYWHGGYDYLWCWAALNWLGVTVENGVRRLVETPCIQDSLARYFSPQARRRFHAALASCSTSMLILSNLVFLGGNEVGKTYWNRIFIQGWPWVTLSVLGFLYCYSHVGIAWAQTYATD

SEQ ID NO: 367 - DNA, 4224 bp, Homo Sapiens
acaattcataaagtttattctatttgatcttcactctaatttacaaagaaaagcagggaagtctatttctgttttacagaggtgtacagggaggctcacaggggctaagttcacacagtaagccctcgaagctgccagggctgcaaagcccaccctctttccaccgcaccgaactacctcctttcgcctacaaaacgtaggtggggaccactggtgttggaatgacggcccacctcgagtttcaggtgacttccactctgcaattaacttgcaggcagccccagacctgcaatgaacacacgggtgggggagagatatgcacgccagggtcagtgggaaccaacagccgaggggtgagcggggctaggggccccgggccgccggcggggcaaacgcggttcagaaacgcaggccgcgctctggcccgccccctgcagcagcacggcctgctcgccatcgcccggagagcgccgcgggttcccgagtccgggcgcggagggcgcgcgggcacggcggcaggggcgtgctcggaggacgcgcgctgcgctgctcctccaaagggcagctccgggggaaagagggtggcgtcccggggaagcccgcagccgccgccgatgtcgctgggactcggaagtgccgaaagaggggtgttgggaactcgcggcgcgcgtgaacgttgccgtcgccgccgcccgggacagcccggagggcgggacagaggaagttcccggtcgggcgaagaagacaaaagcggcgggggccgcgcgcgcagtgcgcccgggcaaaggcggggatctaggcgccgggacaagtccgcgcacggccctgcccacgtcctctctccttggcttcgtccccagcttccggaactgctgcggggagttgcgaactctggtcctcttggcagtatcggcgaaactctcagcgtaggcatcgggaaccttcgtgccaaggagccatgctgccccgatgggaactggcactttacctacttgcctcactaggcttccacttctattccttctatgaagtttacaaagtctccagagaacacgaagaggagctggaccaggaatttgagctggagactgacactttatttggaggattaaagaaggatgcgaccgactttgagtggagcttctggatggaatgggggaagcagtggctggtgtggcttctccttggccacatggtagtgtctcaaatggccacactgctggcaagaaagagaaggtggtacaagacagaaaacgagtactacctgctgcagttcacgctgaccgttcgctgcctctactacaccagcttcagcctggagctctgctggcagcagctgcctgctgcatcgacctcctactcctttccctggatgctggcctatgtcttttattatccagtcttacacaatgggcccatcctcagcttctcggagttcatcaaacagatgcagcagcaggagcatgactccctgaaggccagcctgtgtgtcctggccctggggctgggccgccttctttgctggtggtggctggccgagctgatggctcacctgatgtacatgcatgccatctacagcagcatccccctcctggagactgtctcttgttggaccttaggaggactggcgttagcccaggtgctctttttctacgtgaagtacttggtgctctttggcgtgcctgctctgctcatgcgcctggatggactcactccacccgccctcccccgctgcgtgagcaccatgttcagtttcaccgggatgtggaggtattttgatgttggactgcataatttcttaatcaggtatgtgtacattccagtgggcgggtcccagcatggcctgctggggacactgttttccacggcgatgacatttgcatttgtgagctactggcatggcggctacgactacctctggtgctgggcagcgctcaactggctgggagtcactgtggagaatggagtccggaggctggtggagactccctgcatccaggacagtctggttggttcaaagtccatatgcctagaggcaagacagctggaaaagaagcttctgtagtgcgcccgatacttctccccacaagctcgccgtcgattccacgctgcccttgcttcttgttccacctcgatgctgatcctgtccaacctggtatttcttgggggcaatgaggttgggaaaacctactggaataggatcttcatacaaggctggccttgggtgaccctctctgtcctgggattcctgtactgctactcccacgtgggcattgcctgggcccagacctacgccacggactaatgctgttgggcccaggccagtccttgttgctggcctccaaggcaaatagtgcttcaccctgacctctcactccaggacagcctctaagggatttgatctgctcatcttcagttgaatgccctcactccaagactggatgctggatctcatagaaaattcacagccagacaatcttctaatctggagtctttgagatcttctaccccaactcatcattttcctattgaggaaacgggtccagggcagtcgtgtgtcttacccagctacacagggtgacattttggtctagaacctagtctcatgagccctttgcattctttccccttaagcaagaatagaatgtagtggaaatttattgattgagacacagaaatcctgattagtgataggcctgtcttctgggcaatatttctaaaatatttgagtgacattgatgtttaagtgacctccttcatcacatcctgcagtatctccagaagcagcactagggtttgagtttcatgcttcagcccctctgtaggaatgagaccaagccacagctgtcttttgaattacgtagtcgaagaagacggtagcagccctgtagcattctaaggcatctatacccaaggagtcctgtgatttgagcttcagcagggtgatctacatttgggtgcttgtttctgagatttgcagagaagtataacatggtagttcctctaccttacagttaatcgtttcttaataaagaagcagaatttagaaaccacaggatagtgtacccacagatgggtgttatcaaggccagtcatgaggatggtgtcctggagtcttgtccaccctctccatacaagtctcaaaagtcatcctcctactcagtgattcacgtttagtggtttatattattaaggtttgattcaaacagagccttttctgtcctgtagataatctacatgtttgtagaattattttgaatatgtttgaggaaaatgtttaaaatctaaatatactcacataacttgattattcactcctctgaaaagatgctggataggctaccaaagttcccaagtggtagataattcagaagacttgtttgaatttggattttttttttttttggagtggggaagggtataaaggaggcttaaaatttgaatccataatatatctaattacaggagaatttacaacatctcaagtacgtaaattaagttgtcattgagtgaaaggttcacttggacctagtgctgcctcctgtttattacatagcatggcccttatgtcttgagttgaggttatcatctcaatgaggcttaagctcctagagtacaggaccattttgttgattgtctttcttcatagcttctctgcttggcaaagagatgggagggggccagatactgactacctggggtaggcacattatgtgttaaagcaagacagaggccagagaggggcaggtagacctgcatagcagcagcctcagcagctgtcttggtaaaggagagagagagacatggggccagtaattccggggtgctcagaagttttaggagggaatgagcctcagggaggagtgagcacctaaatgaacgcagtaaaccttcatggaccaacagtgattgaggatttgtgggcagccagagggagtctgactgaagtttacttggaaagaaagggcttgctaagaaaaaagggagtaaaaatgatgatagggaagtgtctaatgtatgtgcacatataagtaatacaaaagttttgagctcttccaagtataccatttatatacaaacaaataggtttattcattcattaaactactttggaagcgtcagtggatatatttgaaagtggtaatcctgaatctcttttaaactattatatgattcataatggttctcaggaattaataaatgattactgtgtttagctctgta

SEQ ID NO: 368 - protein, 368 aa, Homo Sapiens
MLPRWELALYLLASLGFHFYSFYEVYKVSREHEEELDQEFELETDTLFGGLKKDATDFEWSFWMEWGKQWLVWLLLGHMVVSQMATLLARKRRWYKTENEYYLLQFTLTVRCLYYTSFSLELCWQQLPAASTSYSFPWMLAYVFYYPVLHNGPILSFSEFIKQMQQQEHDSLKASLCVLALGLGRLLCWWWLAELMAHLMYMHAIYSSIPLLETVSCWTLGGLALAQVLFFYVKYLVLFGVPALLMRLDGLTPPALPRCVSTMFSFTGMWRYFDVGLHNFLIRYVYIPVGGSQHGLLGTLFSTAMTFAFVSYWHGGYDYLWCWAALNWLGVTVENGVRRLVETPCIQDSLVGSKSICLEARQLEKKLL

SEQ ID NO: 369 - DNA, 4152 bp, Homo Sapiens
acaattcataaagtttattctatttgatcttcactctaatttacaaagaaaagcagggaagtctatttctgttttacagaggtgtacagggaggctcacaggggctaagttcacacagtaagccctcgaagctgccagggctgcaaagcccaccctctttccaccgcaccgaactacctcctttcgcctacaaaacgtaggtggggaccactggtgttggaatgacggcccacctcgagtttcaggtgacttccactctgcaattaacttgcaggcagccccagacctgcaatgaacacacgggtgggggagagatatgcacgccagggtcagtgggaaccaacagccgaggggtgagcggggctaggggccccgggccgccggcggggcaaacgcggttcagaaacgcaggccgcgctctggcccgccccctgcagcagcacggcctgctcgccatcgcccggagagcgccgcgggttcccgagtccgggcgcggagggcgcgcgggcacggcggcaggggcgtgctcggaggacgcgcgctgcgctgctcctccaaagggcagctccgggggaaagagggtggcgtcccggggaagcccgcagccgccgccgatgtcgctgggactcggaagtgccgaaagaggggtgttgggaactcgcggcgcgcgtgaacgttgccgtcgccgccgcccgggacagcccggagaaactctcagcgtaggcatcgggaaccttcgtgccaaggagccatgctgccccgatgggaactggcactttacctacttgcctcactaggcttccacttctattccttctatgaagtttacaaagtctccagagaacacgaagaggagctggaccaggaatttgagctggagactgacactttatttggaggattaaagaaggatgcgaccgactttgagtggagcttctggatggaatgggggaagcagtggctggtgtggcttctccttggccacatggtagtgtctcaaatggccacactgctggcaagaaagcacagaccctggattctcatgctctatgggatgtgggcctgctggtgtgtgctggggacccctggtgtggctatggttttgctccataccaccatctctttctgcgtggcccagttccggtctcagctcctgacgtggctctgttctctcctcctcctctccacactgaggctgcagggtgtggaagaagttaagagaaggtggtacaagacagaaaacgagtactacctgctgcagttcacgctgaccgttcgctgcctctactacaccagcttcagcctggagctctgctggcagcagctgcctgctgcatcgacctcctactcctttccctggatgctggcctatgtcttttattatccagtcttacacaatgggcccatcctcagcttctcggagttcatcaaacagatgcagcagcaggagcatgactccctgaaggccagcctgtgtgtcctggccctggggctgggccgccttctttgctggtggtggctggccgagctgatggctcacctgatgtacatgcatgccatctacagcagcatccccctcctggagactgtctcttgttggaccttaggaggactggcgttagcccaggtgctctttttctacgtgaagtacttggtgctctttggcgtgcctgctctgctcatgcgcctggatggactcactccacccgccctcccccgctgcgtgagcaccatgttcagtttcaccgggatgtggaggtattttgatgttggactgcataatttcttaatcaggtatgtgtacattccagtgggcgggtcccagcatggcctgctggggacactgttttccacggcgatgacatttgcatttgtgagctactggcatggcggctacgactacctctggtgctgggcagcgctcaactggctgggagtcactgtggagaatggagtccggaggctggtggagactccctgcatccaggacagtctggcccgatacttctccccacaagctcgccgtcgattccacgctgcccttgcttcttgttccacctcgatgctgatcctgtccaacctggtatttcttgggggcaatgaggttgggaaaacctactggaataggatcttcatacaaggctggccttgggtgaccctctctgtcctgggattcctgtactgctactcccacgtgggcattgcctgggcccagacctacgccacggactaatgctgttgggcccaggccagtccttgttgctggcctccaaggcaaatagtgcttcaccctgacctctcactccaggacagcctctaagggatttgatctgctcatcttcagttgaatgccctcactccaagactggatgctggatctcatagaaaattcacagccagacaatcttctaatctggagtctttgagatcttctaccccaactcatcattttcctattgaggaaacgggtccagggcagtcgtgtgtcttacccagctacacagggtgacattttggtctagaacctagtctcatgagccctttgcattctttccccttaagcaagaatagaatgtagtggaaatttattgattgagacacagaaatcctgattagtgataggcctgtcttctgggcaatatttctaaaatatttgagtgacattgatgtttaagtgacctccttcatcacatcctgcagtatctccagaagcagcactagggtttgagtttcatgcttcagcccctctgtaggaatgagaccaagccacagctgtcttttgaattacgtagtcgaagaagacggtagcagccctgtagcattctaaggcatctatacccaaggagtcctgtgatttgagcttcagcagggtgatctacatttgggtgcttgtttctgagatttgcagagaagtataacatggtagttcctctaccttacagttaatcgtttcttaataaagaagcagaatttagaaaccacaggatagtgtacccacagatgggtgttatcaaggccagtcatgaggatggtgtcctggagtcttgtccaccctctccatacaagtctcaaaagtcatcctcctactcagtgattcacgtttagtggtttatattattaaggtttgattcaaacagagccttttctgtcctgtagataatctacatgtttgtagaattattttgaatatgtttgaggaaaatgtttaaaatctaaatatactcacataacttgattattcactcctctgaaaagatgctggataggctaccaaagttcccaagtggtagataattcagaagacttgtttgaatttggattttttttttttttggagtggggaagggtataaaggaggcttaaaatttgaatccataatatatctaattacaggagaatttacaacatctcaagtacgtaaattaagttgtcattgagtgaaaggttcacttggacctagtgctgcctcctgtttattacatagcatggcccttatgtcttgagttgaggttatcatctcaatgaggcttaagctcctagagtacaggaccattttgttgattgtctttcttcatagcttctctgcttggcaaagagatgggagggggccagatactgactacctggggtaggcacattatgtgttaaagcaagacagaggccagagaggggcaggtagacctgcatagcagcagcctcagcagctgtcttggtaaaggagagagagagacatggggccagtaattccggggtgctcagaagttttaggagggaatgagcctcagggaggagtgagcacctaaatgaacgcagtaaaccttcatggaccaacagtgattgaggatttgtgggcagccagagggagtctgactgaagtttacttggaaagaaagggcttgctaagaaaaaagggagtaaaaatgatgatagggaagtgtctaatgtatgtgcacatataagtaatacaaaagttttgagctcttccaagtataccatttatatacaaacaaataggtttattcattcattaaactactttggaagcgtcagtggatatatttgaaagtggtaatcctgaatctcttttaaactattatatgattcataatggttctcaggaattaataaatgattactgtgtttagctctgta

SEQ ID NO: 370 - protein, 493 aa, Homo Sapiens; identical to SEQ ID NO: 366

SEQ ID NO: 371 - DNA, 4419 bp, Homo Sapiens
acaattcataaagtttattctatttgatcttcactctaatttacaaagaaaagcagggaagtctatttctgttttacagaggtgtacagggaggctcacaggggctaagttcacacagtaagccctcgaagctgccagggctgcaaagcccaccctctttccaccgcaccgaactacctcctttcgcctacaaaacgtaggtggggaccactggtgttggaatgacggcccacctcgagtttcaggtgacttccactctgcaattaacttgcaggcagccccagacctgcaatgaacacacgggtgggggagagatatgcacgccagggtcagtgggaaccaacagccgaggggtgagcggggctaggggccccgggccgccggcggggcaaacgcggttcagaaacgcaggccgcgctctggcccgccccctgcagcagcacggcctgctcgccatcgcccggagagcgccgcgggttcccgagtccgggcgcggagggcgcgcgggcacggcggcaggggcgtgctcggaggacgcgcgctgcgctgctcctccaaagggcagctccgggggaaagagggtggcgtcccggggaagcccgcagccgccgccgatgtcgctgggactcggaagtgccgaaagaggggtgttgggaactcgcggcgcgcgtgaacgttgccgtcgccgccgcccgggacagcccggagggcgggacagaggaagttcccggtcgggcgaagaagacaaaagcggcgggggccgcgcgcgcagtgcgcccgggcaaaggcggggatctaggcgccgggacaagtccgcgcacggccctgcccacgtcctctctccttggcttcgtccccagcttccggaactgctgcggggagttgcgaactctggtcctcttggcagtatcggcgaaactctcagcgtaggcatcgggaaccttcgtgccaaggagccatgctgccccgatgggaactggcactttacctacttgcctcactaggcttccacttctattccttctatgaagtttacaaagtctccagagaacacgaagaggagctggaccaggaatttgagctggagactgacactttatttggaggattaaagaaggatgcgaccgactttgagtggagcttctggatggaatgggggaagcagtggctggtgtggcttctccttggccacatggtagtgtctcaaatggccacactgctggcaagaaagcacagaccctggattctcatgctctatgggatgtgggcctgctggtgtgtgctggggacccctggtgtggctatggttttgctccataccaccatctctttctgcgtggcccagttccggtctcagctcctgacgtggctctgttctctcctcctcctctccacactgaggctgcagggtgtggaagaagttaagagaaggtggtacaagacagaaaacgagtactacctgctgcagttcacgctgaccgttcgctgcctctactacaccagcttcagcctggagctctgctggcagcagctgcctgctgcatcgacctcctactcctttccctggatgctggcctatgtcttttattatccagtcttacacaatgggcccatcctcagcttctcggagttcatcaaacagatgcagcagcaggagcatgactccctgaaggccagcctgtgtgtcctggccctggggctgggccgccttctttgctggtggtggctggccgagctgatggctcacctgatgtacatgcatgccatctacagcagcatccccctcctggagactgtctcttgttggaccttaggaggactggcgttagcccaggtgctctttttctacgtgaagtacttggtgctctttggcgtgcctgctctgctcatgcgcctggatggactcactccacccgccctcccccgctgcgtgagcaccatgttcagtttcaccgggatgtggaggtattttgatgttggactgcataatttcttaatcaggtatgtgtacattccagtgggcgggtcccagcatggcctgctggggacactgttttccacggcgatgacatttgcatttgtgagctactggcatggcggctacgactacctctggtgctgggcagcgctcaactggctgggagtcactgtggagaatggagtccggaggctggtggagactccctgcatccaggacagtctggttggttcaaagtccatatgcctagaggcaagacagctggaaaagaagcttctgtagtgcgcccgatacttctccccacaagctcgccgtcgattccacgctgcccttgcttcttgttccacctcgatgctgatcctgtccaacctggtatttcttgggggcaatgaggttgggaaaacctactggaataggatcttcatacaaggctggccttgggtgaccctctctgtcctgggattcctgtactgctactcccacgtgggcattgcctgggcccagacctacgccacggactaatgctgttgggcccaggccagtccttgttgctggcctccaaggcaaatagtgcttcaccctgacctctcactccaggacagcctctaagggatttgatctgctcatcttcagttgaatgccctcactccaagactggatgctggatctcatagaaaattcacagccagacaatcttctaatctggagtctttgagatcttctaccccaactcatcattttcctattgaggaaacgggtccagggcagtcgtgtgtcttacccagctacacagggtgacattttggtctagaacctagtctcatgagccctttgcattctttccccttaagcaagaatagaatgtagtggaaatttattgattgagacacagaaatcctgattagtgataggcctgtcttctgggcaatatttctaaaatatttgagtgacattgatgtttaagtgacctccttcatcacatcctgcagtatctccagaagcagcactagggtttgagtttcatgcttcagcccctctgtaggaatgagaccaagccacagctgtcttttgaattacgtagtcgaagaagacggtagcagccctgtagcattctaaggcatctatacccaaggagtcctgtgatttgagcttcagcagggtgatctacatttgggtgcttgtttctgagatttgcagagaagtataacatggtagttcctctaccttacagttaatcgtttcttaataaagaagcagaatttagaaaccacaggatagtgtacccacagatgggtgttatcaaggccagtcatgaggatggtgtcctggagtcttgtccaccctctccatacaagtctcaaaagtcatcctcctactcagtgattcacgtttagtggtttatattattaaggtttgattcaaacagagccttttctgtcctgtagataatctacatgtttgtagaattattttgaatatgtttgaggaaaatgtttaaaatctaaatatactcacataacttgattattcactcctctgaaaagatgctggataggctaccaaagttcccaagtggtagataattcagaagacttgtttgaatttggattttttttttttttggagtggggaagggtataaaggaggcttaaaatttgaatccataatatatctaattacaggagaatttacaacatctcaagtacgtaaattaagttgtcattgagtgaaaggttcacttggacctagtgctgcctcctgtttattacatagcatggcccttatgtcttgagttgaggttatcatctcaatgaggcttaagctcctagagtacaggaccattttgttgattgtctttcttcatagcttctctgcttggcaaagagatgggagggggccagatactgactacctggggtaggcacattatgtgttaaagcaagacagaggccagagaggggcaggtagacctgcatagcagcagcctcagcagctgtcttggtaaaggagagagagagacatggggccagtaattccggggtgctcagaagttttaggagggaatgagcctcagggaggagtgagcacctaaatgaacgcagtaaaccttcatggaccaacagtgattgaggatttgtgggcagccagagggagtctgactgaagtttacttggaaagaaagggcttgctaagaaaaaagggagtaaaaatgatgatagggaagtgtctaatgtatgtgcacatataagtaatacaaaagttttgagctcttccaagtataccatttatatacaaacaaataggtttattcattcattaaactactttggaagcgtcagtggatatatttgaaagtggtaatcctgaatctcttttaaactattatatgattcataatggttctcaggaattaataaatgattactgtgtttagctctgta

SEQ ID NO: 372 - protein, 433 aa, Homo Sapiens
MLPRWELALYLLASLGFHFYSFYEVYKVSREHEEELDQEFELETDTLFGGLKKDATDFEWSFWMEWGKQWLVWLLLGHMVVSQMATLLARKHRPWILMLYGMWACWCVLGTPGVAMVLLHTTISFCVAQFRSQLLTWLCSLLLLSTLRLQGVEEVKRRWYKTENEYYLLQFTLTVRCLYYTSFSLELCWQQLPAASTSYSFPWMLAYVFYYPVLHNGPILSFSEFIKQMQQQEHDSLKASLCVLALGLGRLLCWWWLAELMAHLMYMHAIYSSIPLLETVSCWTLGGLALAQVLFFYVKYLVLFGVPALLMRLDGLTPPALPRCVSTMFSFTGMWRYFDVGLHNFLIRYVYIPVGGSQHGLLGTLFSTAMTFAFVSYWHGGYDYLWCWAALNWLGVTVENGVRRLVETPCIQDSLVGSKSICLEARQLEKKLL

SEQ ID NO: 373 - DNA, 342998 bp, Mus Musculus
  misc_feature (1)...(342998): n = A,T,C or G
ctgtggcattgatgtttgagcgcacttctgaactggcttttgttgagactatcagtgtagaaagcatgcgctgtcccaaatccgctgttactatgagaaatgaggagctgcttttaaggtatgttgttgggtcctttgtttttaacataggcttttctagttttgagagctggtggagacgccaatcttgccctgaatcaagcagcttccttatcttagaagagaaagagagagaaaaaagaatctaaacagagagagggaaatgaaattgagaccaagagattgggagggagagcgagcaagccagggagagaaaggagaaggactgctgtgagggagttgtgtgtgtactagttgtcttttgaaagcagaccatgcatttgctccccgctacctatgagcagccagtggatgttttaagggttccgaatctggctgttggttcgtcttttcctttgcaatgtctaagcctctttcattattatgcactctgcatggaataatcatcgaaaaaggagctgaggagactccatattagacttgcgttccaaataccactctaatctggacttagacacctaaatagtcctctcgtgttatcaggtttggatcactttatcctgcttgccaaaatgtgtacctgtttggagacctctgttcatgcatggcgtcctgggtcctcttgtgcgggaaagcagatacctgcttcctgcatgggtggtggggttctatcatagaccgagaaggagacacagctgaccttttgggaagcggagagagaattatgatagaattggcatcctgcttttaaaaatgcagtcttttgtttatttgctagcagacattgtagcactgaatacatctttgggtctgacaatgggaccggtggaacaatggagctgtcaaactagcttaatgcatgtctggggctggttttctgtttgtttgttttttttttccagcacccccttttatctcctataatcttgttgtgtggactatcagagggaagctttgggtctgcttatttgtggttttatgcttttaaaaatttattatctgccgttctcagagctttttgcattttgcagttatgttggctggattaagttagagatttatggcttgcctctctgttaactacagaaagaaaacttattgattgaggatgcttgtaatactattatcattgtggcaaatgccttgttgatcagacctgcttctacagtatttaccgccgaggattttaaatgctccctttttttggacctagggaatgtagcataaaagagaagttaagaaggacatacttaatgctcaagtaatcagtattcctagtttttagcttcccctttggcatccacagacaagcagtttagaaatccaagaataagaacttttgcctttccaattttggtcaccaactattgttctgttactttgttaagtgaaaggtttcgatggaatatattgatctttgatttgatgtttatattcttacaaactgcatttctatgaaaggcaagtatttcacgtgtattcggatgcccttcatttcataagataaactggtttctaaggtgaaaatactgtaggagagaatatggaaaaatctggttcaaacttctcaaatgctgaaaccatttttattccacactggatgtaaaataactgaaattaaaataataagtaatagatttacatgaaaatcctcttttaaggttgatgtctataaagaatatatatttatagtgttttagtgtttttgcttaatgaaccgtttgtgccagatcaatattatgagatatgtattagtaagttcatagactaaaaccgagagcccaatatgagaaacaaaaggggagttgtttcaatgaataaaataaaagataaaattggtttcaaatatttcctgatagagtttggtacaaattagggatgtccctcattaataaggaaggacatacatgtattacttataaaaacacaagtatgaagtactaattattccttagattcagagacaaacttaagttgaaatattattaaatacttattgtataattatttacctaaatgttatcggctaaccagaattgcctttgcaagttgagatttcctaccggtaatatttccagagcttaggtacaccaaagcatatgtgtgtggtgtaataatattcttcaagttatccattgtgaatagagtgggttttaaaggcatgcttgttatgttctctcggttccaatgggatctgaactgctccttgctttgggtatagcaataattgctttcaggatgagctcataaaaggtaatgggtaaggcttcatatccgaggctaaccaactgttaccaacacaccccagttctgctttcaccgaaaaaaaaaatttcattctaaaacacagtgtgtgtgtgtgtgtgtgtgtgtgtgtgtgtgtgtgtgtgtgtgtggtctaagaaaaaagcagtcttccatgcttgctagatgcttgtcaggaactcatttaaataaagaagtcactcggagaccaccgtgttgaatttttttcttaaattggtaattatttaactgtgatacattcacttaaatttctgattgctcatcattagttaggctggacacagggggatttcacttgtccactcttgtctggtgttctcatgcatcaccagtttccagatttgggggtcccatacctctttcccacccaccatacaattccagcatccaatatacagaacaatgtatttttctctgtgctcatagaaaaagtataatgctgggagttggcaaacgtgcctgcttttatttctacaaaagtaacaggataatgtagtgtgcagcatactattcactcggtatgcaatgattctcctggacgctgacctacacaagtgtagaaacaagatttaattctaacctaagacctgaagagaatccataggcaaatattcaaactggtaaaatggtctctttcactagagaataacaactgcatctcaagcccctttataaagcaggggcctcgggaatatttacataaatgtgttcagccgaccacagaccaagatctataacctcccacgtattaaaaattcttttctttgcaaggatggaacctgacaaacatttctttattggctctttttttttttttaaatgttactagataaaattgcaagatgtccttggggggctggaaagatgacaaagagtgtttgactaatattcatatctagaactttatagcaactgtgaattgtgcttgagtacctgggaagtctttcaaagagtgaatcaatactaattattgtaatcaggggggttaattaggtgaaaatgtggctgatggaaagttcattgctcacagccctggaagcccccaggttgataggaggaaagagaattagagaagggagatgaggatgatagcaccagctctcctaaagaaaaacacaactggattttctttcattatgctagtggtgaaattaggagggccagccttattgttatgtagatgtttgagtgatagtgtgaacagaatgggtttgcctagcagcccctctgccctgtgccatttctctatccttcttaacactgtaccaagttcaagccctgttagtgacagccatgtcctcttgaatcatgtcttccggccttcaccgacttccttgattttgataattccggagggactctggccaggcagagatggctctttctcatctcctgaaactacagcttgcctctttaattattggacttgctagttttctgagatacggtggtgacttcttttagtctgtagagaagacgaggctggggtggtatgaaatcaattataattttgtggccttttgctcacctgacattaggaagaggctgctaggaaaaaaaaaaaaaggttgtgtgaggatagggggatgagaagccttaggttgtagccagctcagagcagaaataacatatgaaagaaccagggtggctttgcaacacaccgcacaaacaacaaaggggaactgtgtgtgtgtgagtgtgtgtgtgtgtgtgtgcatgtgtgcacatgtgtttatatgtgtacatgtgtatgtgcatgcaatgtgtgtttatgtgtatacgtgtgtgtgtgtgtatgtgtttgtgtgtgtgtgtgtgtgtgtgtgtgcatggtacgtgttgggttccactcaactaggagttgccactggtggattctgatgagatacaaggtctactttgttccccagtacaccttcacacatcatagaaagtcatgattacaaattatcaattatcacgtacgggtatgctcatctttcccacagttttcctcttgtgacccacctagcacatttccttgtatgccaaaataaagtcaacaggaaatggcatctgcagagggaggatggaccagagtgacatgtatcatgaggacagcttgagcttctactactctagcccactaaaggttgatctgctcatcattgactacacagggtcaggatgaatcactggagtttataaagcatcactactggcatgcctccaaggaacaaaaaaaaacctaaaaaatcagaatttacttgtaaaattattccattccacgaagtttgatgtggtagcacataggaccctgtaaactgttggtacacttttgagactcatggcttttttttttttaatttgcatcttgagaaagctcacagttgcatcactaagaattctgatagaggtgacattggcttctatcagggaagtgagtggtctctgtgtataaacctaactgcatttttcaccttcctggaaagccatccatcttggtcctataagagccataggtcctacactttttatcattccttgttctttgaataccatttcaagccccccagatcatcatcctctcttcatagacagtatcctatctcttctctctgggcttcaggctttagacatgtcgctgaaactttaattctagaggattaatgttgactttcttctcaactgccacttttggtttccaacaaagattggggtatgagatgttattatagaaagcatacagttaagacttagcttagacttggcatgctatgaagtgcttatattcatatcgtctaatgtaattctcataaatatcaaagtggttatgatagttgtaccagttttaaagatggaaagctgaaactgaaaataataaagtcacatacctaaagtcatagacatcatagtgaaaaggactataactcagagctcagctaaattccttccctgggcagtggcaaaaacaacaatttcatatttgcttctctttttttttttccctgttactgtgaattgaatctagcattttgaaccactgaacacttatctaacaatctgtacactccaccacaaccctttgagacagaatctcactaagttgccaaggacggccttgaattcactatgtagcccaggcctgatcctcccaactcagtctgtgcagtgggatcccagggctatgccaccaggctcagtgagatttgccattttaaaaagtaattgtttgtattgtttttaattatgtctacggtgtatctaggtatgttcatgtgagagagttatggggatatgtgttgtgattttgtattggatgcctgggagctggagttacagagggttgtaaggcctacaaatagggtgctgggaactgaactctggttctctgcatgagtagtatgtgatcttcaccactgaaccaggtatttgccatcttaaaacctatgtcgcagctctcccacagaagcctttgattggcagctgcttctttctattgtcattggtccattcatcagtggactgcccactcaagggcgcatcaagatgctggccatagctaacggttttaactgctctatccttcctggatcacagtttgtttgtttgttttggttttttaactttacttatttttcagtgttaatttttggaagggcataggacttatgatccagaagaaataaaaactggtgataacaaaggaaggattaaaggaataaggaaggaaattatttgaaacatcacaatatcacagcttctgtgttctcacttgcttaccttagagttcataagctctttgttttagtgttagacaggatctccacatacaacccatgctggccacaaactccacatcctcctgcccccactttccatgtgctgggatttataggagtagaccaaccacacttggcattcaagaagtctaagaaaaaagtatgccatgctcatttctcttagactttcagctatacaacagaaacatctatatgatgttgggaagaacaatagagaaattcaaagctccatggatttaaaatgttaattttaaaaatgtcatattacagttataaccaatcaaacaacaatcaaatgtcttcaataaaaaacatttcttgactgtcaaatagctccaaaacttttggggagaaaagaaaactatatctggagaaggatcagtggtcaaatgcacactgacagacactggacttggctttgaaggatgtgcaaggtggaattaaggcagtgggtaaagaagatgtctatctttgttaataaaaccaaaaaaaaccaaactcccaagcttacccactcgccatccttagttcccaaggtctcactctcctccttccttgccatattcctataaaacagggcaaacatgggctatgggctgttgagagacttagggattaggtaacagctttacactcaacaatagagataaagagaagctatacaaccttagattcaccctggatagttagacaatgtccataaaatggcaaaatttccatgaagatctatgaggaagaaaagaaatttcctctagtagacttagtaggaattagcatcaaaagcaaatttagataggcatttgggatcttcgaaaacctctcttatagattaaaagtagattcagatttgaggtattattatagaaagaatttttcctgatctcaataccttgatatattttcaacctacgtgtcactttaatagctcagttatataattgctatagtaataattaggttgccacattatacgccttatctgaggatcatggcaagctttgaatggtgagccattcttctctactaagaagtaatgaccacaagtaagaaaaaagtctagttgattaatcacacacaatgttaaatgacttgttctggagtcaatcaatgttttgacaaaatgaaattgagaatccaacaggtttcgttcttaaatctcatgatccttttactcagttcaaaattatcatttgccctaaagggtctgacctgtaaactcgaagtcagatgtttaagagcccaattctctttgctggtaaccagttatcactggaagtaagtactttatttttacagaaactcaaccttttagtctcttaatcctcactcttcttccagttgtatttgctcatgaaaaacaaatgaacaaaaacagaaaatagctttggacaaatgaagccgattgtctttttcattgaaaattctgattccggataagatccatctcagtcaaccccaggcctaaagcttaccacatccatttgttgatttctttttattccccgcccacctgttcctgctctctcaacgacctcatgttatgcaggcaactgggtcctccagctgttgctgctcagctgctgtagtttgtcaagcagcaatttctcccttttaaaaatctgacaacttgggagagagtcagataactttctgtggattaggggaaacatttgatgggctaggttgttgatgggtggattgcaagggaattagaaacgtcactctgataagtatacattttgttcctggcgccagtctggcaccaaataagggcgctagtatcatttgacaaatctcagcaacttccaaaagggttctggaacattccttccaaaggctgcacccatcccctccactgtcttccgtgtgcaaatctccatgctagacagggaagccttttttcttcttcctaccctttccccagacttctttgaaatgttcccatcctatcttcttgctttgtggtacacaatctctcaccctacccctcctttcttctggcaacgtctggaaagaaatcctgccgctccctatagagacagctgttgctacttcagaaaccagccatggtcaaggcaagtgacatttgatttctggtagaaataagtaaccctcggccaactcctcacttcactttggtagccacccacgccgcctcagacacacagctgtagaggagggtgagactttgtctggctcccatttgaaagacagaaagaaaaagtggtgggtggggcagagaaaggaagagaaggctgagcaagaaaaattaaaggtttgcaggagtgggctaatggagaaaggagaaaagggaaaggccaggttagtgggggaaatgaggcaatggctggcctctgggtctgaaagacccagaatattaacgttctctgcccttggaatggaagctcctgacagccctggaggggcatctcattttccacttcgaaggtaggtatacaaagaacagcttccgttgaaaagcctcttcagaaggaagacaaattcaccatgctgtattttggctctattaaaaacaaattgggggggggggggacctaacaacaacacatgactgcacaatgtcagtagaagctgttctctaaggagatagactagttaatatccctttaaaaaaatcccataatagggcctacattttcttgttccaaatggctctgagcacactgggcttgcttttatttgttttttgttgttgttgttgttttctttttttaaaactgaaacaactatgttaataaaatttgaatccaaaagtgtgatagggaaaagatattttggcctttggtttgtgttgagtagccaatagcgaggaaagtaaaaaaaaaatactcataaatgggattttggagtccagtgaacaacacaaacacatctttgttaattactgatggccagtgcttttaaaggtacaattatgtgggaagctaagaacaggattaataaaatatagaaatttgtctcaagccatataaagttatctgcagacaaaaacaaaacttcttttattatgaacattaatgagctgtcaggtctcagtttcagatgcaagtatccattttgcaaaaaccaacaacaacaacaagaaaaagttgaaagattcatagctagtggaatgtattccggttccgtgagtgggtggaaggaagaggactcttccatttcaaggatgcacactttacgtgagatgcgttattagcaccctgttttatcgagggacgcttgcttttaaccctggtgataattcagtgctcagacaatggccactggacacaacagtatgggatgctgaggagggaaagtggagctgaaacagcacagcgcactgcctgccttggaaagccgcatgtaaaatgaggtcattcagaaactttcccttgaagtgcttccaattcttgaattgccttttgtttgggaaatgaatagcaagttgattaaaaaaaggagacaattaggggaggtagggggatggggcagagacgagcttaaggttttgttccagtggagctaaaactatgaggaaacttcattgttcctatgcctggtccccagggatgtctgcacaaggtggtatcaccaactagttcttgtccaccagagagagaccccactaatgtcccctttcatcgctctcgataagatcgttggctttaaaaatcgctcttccttgaacccgagtgctcaattgtggcccggtgaagctgtggtctgccagttaatttaaactgcccacacgtgatacctgaaggctcactgctctatggagatttaaaaagaagctttgttgagttgttctggggttgggggtgagtgtgtttttccccttttggccaaagtggtaaaaagagaaactgaagcttttcattcaaagctctttagctgtgtatttttattttttacgtttaagttgattttcagaagtggacaacgtggtgtgattatagaagctgaacagacattagaaaccaacgctgtcagtgggcgacttatgaatacctggcaagtgggggaggacgaacattttgcctcccctgctgcttctccatcaggtgcctatgcagccacgccatcatctgtgtatttgccagccagagtgtttaaacccagctacactctgtgagcttttccaggttcacatcaccatattccatgtagtgtggttctattttatttttgaccctcgttttgcttctaacttcaaatggcaaacggaaatgtgctttgaaaagcatgctacacagtagttgttaaataaggcaataacctatgcacttgtaattctctgcctatgacctacttacatcctccttcaccctccttatagtatgattaaaagctgctttgaatccactattgcctcaagggatttgaggctagaatttaacaaactgctgagaaggcttaagtcagtaagagggcttccctacagcttcctctgactaattcacatgcaattaaagagaaaataaatattttacaagtgtgtatgtcgatgaagcatttctgccttataggatataggtacacacggagctttatttctgtagctgatgcttttctgtgtggttgtgtttgttttggaggctggctctgttcgttcggtctcaaatttactatctggccaactcaattcttttttttttttcccattttttattaggtatttagctcatttacatggccaactcattctatgcattcaggatttatgtaaatagtgtataatagtctagaattgtcaagatttgtcttcagttatccagctagctacatcagtaagagaatttcaaaattagttggcaatggcttgataaggagtagaaacagattagaatttggaggaaacacttgggtatggttttgatctaatagttcatttttgatgcaattgtctgtcaagtgattctaagctgggacctgactcctccagaaaggcaatatttaaaaactgaaagttaatcagcgctcccatcttccaaccttgcagtcaggaggctaaaagccagttgaagaaggaagttctagttaattacagttgtttgtgtggatttaactgaatggcataggcctgttactccatattgctcactgacttatctggatttacaattttgtcttataatctccaaggacagtgctcactgtcacacagagattggtgaggaaaatgtgaatcttttctttctatcatgtctgataaatttaacaattgtttacttagttatttaaccatttagctaccataatccaggcctgccttcatttgtgagggaaaacccaggtccttagtacaatattctgctttctttagaataacaacagaatagagtagacataaaatttcaaataaaaccataaatttatatacatccgatgtcagtgttagtatgtatatacatgcatattcttaagtgtatacatatacattacttcaaagttcaaaccatgtcatttgaagatagaataaaaaagatttttacctcaaagagtaaactatagtttctggtatgtcatttacaatgtttacttagaacagaaatttaaagatacatgtggctacactgaaaagtttgctttcacccaaacagccaaacaacaaggacaataagccccgttataaacgttgaaaacttttgctaagcatctgttcgcttttctctcaattacttagtaccccttaccacaaatcctaaattcctaaataataggaaatggcaattttgcgttgcactcttctttttgaaagcaatggtatctgtgacagttcgtcatcttaaggcccttttctttctcagtgtttaagtagataccaaaggctgcacggttgtcctccagtgtgtcactcgggccactgcgcccaaagacagttacttcctctggagcagatagatagagagcagcaccccaggggcggccggcccagcctcaccctggggtgggggcgcggaggtcgcgtgcgatgccggtccccagccgcttcgctctccgagtggccgtgggaaccgggnnnnnnnnnnnnnnnnnnnnnnnnnnnnnnnnnnnnnnnnnnnnnnnnnnnnnnnnnnnnnnnnnnnnnnnnnnnnnnnnnnnnnnnnnnnnnnnnnnnnnnnnnnnnnnnnnnnnnnnnnnnnnnnnnnnnnnnnnnnnnnnnnnnnnnnnnnnnnnnnnnnnnnnnnnnnnnnnnnnnnnnnnnnnnnnnnnnnnnnnnnnnnnnnnnnnnnnnnnnnnnnnnnnnnnnnnnnnnnnnnnnnnnnnnnnnnnnnnnnnnnnnnnnnnnnnnnnnnnnnnnnnnnnnnnnnnnnnnnnnnnnnnnnnnnnnnnnnnnnnnnnnnnnnnnnnnnnnnnnnnnnnnnnnnnnnnnnnnnnnnnnnnnnnnnnnnnnnnnnnnnnnnnnnnnnnnnnnnnnnnnnnnnnnnnnnnnnnnnnnnnnnnnnnnnnnnnnnnnnnnnnnnnnnnnnnnnnnnnnnnnnnnnnnnnnnnnnnnnnnnnnnnnnnnnnnnnnnnnnnnnnnnnnnnnnnnnnnnnnnnnnnnnnnnnnnnnnnnnnnnnnnnnnnnnnnnnnnnnnnnnnnnnnnnnnnnnnnnnnnnnnnnnnnnnnnnnnnnnnnnnnnnnnnnnnnnnnnnnnnnnnnnnnnnnnnnnnnnnnnnnnnnnnnnnnnnnnnnnnnnnnnnnnnnnnnnnnnnnnnnnnnnnnnnnnnnnnnnnnnnnnnnnnnnnnnnnnnnnnnnnnnnnnnnnnnnnnnnnnnnnnnnnnnnnnnnnnnnnnnnnnnnnnnnnnnnggcccccgagctgggcgcggcgtcctgcgggcggaccggccggcggggcgcggggcgcggggtccggggcggggcgggcgcgtgctgccttgcacgctcgtgcctttggaaatgcggggtggcccggcggaacagccctggctctcgcactcattcctgagatgggagcggaggacgagcgagagaaagagagaggaggaggataattacacacccttaagggctttaaaactagccaggtgtactcgcgtgtggaaattagaggtgatttttacgtaatcgggatggttttgtctgataggtagtctgtgatttaataattaatgtgattctggtggttttacgtgtcgtcaaactaggatcgagtggttattgggacaagtagagggctgagatccgcgaggaaaggaaactatatgtaattttttatctggctggtctgtcttcctagggaagtttttctctctctagctcagggatctcagtgggatccacttgtatttcaggcatgttatgtaaagaaaccctaaatagaaaagagattgccagagcaagatgggaaagtctgtgtcctcctgagacatgggatgtatgtaattctcttgtcaagtgaggcatttgataatgtatcagatttagtgggggagggtgctgccgttggttaaatgatgtacaaatttttcctgctgtctccgctgtgagacttcgcatccatatgctttctggcaccctatgttactcttccaggctttatgacccatttccctggcagcaaactttcccctgtaatactagattcttttttggtatgctaagtattatgagttgagaatcttgagaaactccgcaatggccagttattgacgtccaagaattaaaaaaaaaaaaaaaaaatcaagtgggagataaggataatagaatctgttaaatatatattgtcttttcagtcgatcttagggctgctaacttgagtggacacaggctcactcactatctcagagttaatcagataacaaattaaaatgtcgaatccccttttggcattttcctctgaaaaattaatcttggttagtaatattctcatgatggttttaagagatctctatcctgtcctcctcttaaaatccaaatcttacacacacacacacacacacacacacacacacacaatccctttctgcacatgagttactttgtaagtcttccctgtttttctatggttttatctgataggtagtgtgatgttctagaatgttaggggtgaatcagggcgtcagattaatgactagaaatttatggtcacctgctacataagtgacataatatatctaactagtggatgctctatgaatttaaagcattaatgacctctgaaagatgtagtctcttgtcaattaaattatggattatgaaaatttaattcctccttttcatttggtagatgaatgtggtttgttcagactcttagctctgaaaggagcctttgtatctcagccatggagttttgggtttttttctttttttaaatatgaatcttaatatgacttctaccccacttttcttccaaaagttcatgatttccaaacgatagcctttggagtcaatcccagactgtttcagtgtttgacagctattgcttaaatgaactaagaaaaaggaaatttgcaaacgatcccgttcttgtttgttttcaagataactgttgtacatctcccctgtcctgggaacacttgagacatattttccacaagagtgtgtgattaagtcatgttagagattgtgtttgggggccagaggtatatgaatgagatcatagcttttaaaatgcttgaaacccacctaggcggtgtcttttatagccgtatttggacacagaagaagatagctatgtggatttattgttcgggggactggttgccatgggtggtatattaccatgtggcctaaaatggtgtctgttagatattggcctgttcataaaaggagtttaaataaagcataggagcttttctggtgttgattttctaaagcagaacatattttctcaatggcgttttcccacaggaatatattagataagtttgcaagatgtaatatgtttgagtcctccaggcagatgaacaaatagctgttgagatgaattattacgcttgatggccccacgagccatccagtgtttaaagagcccagatcatttaaggctctgtagtgatatagaattgctataacatatgcttcacattttggggattttaaacattcagtaagaaaactgtaaaaggaaataagcattttaaataatattgactgttagagttttatttttgtgtgttattatacactcatagcaaagtgtaatgaaaataggaactgatttttaaattctgttttagactggggcgtttggttttattgagaatggcaatgagtgtttcttctttgttttatttcattagtgatacatttagagagtctcttatcttttgcttttcttttttttaacagaaccaatatataaaggcttagaaataagaaactacaggtgaaaatgtagcttggaaattattaatatcagtctttagatttacagagttagaaggctaggaagttagtgataaaatgaaatccattcttttcacattcagtaagtagttgtaaagaaaataagccatcctgactgtaataaacttgggaaattcatctgcttgttgataacaggcaaaaacattatttatccgtgtatgagtccactgaaaggcactcttggggtcatcattgttaacgctaaacctcttacagggcagtaggactggcccccggaggcaaagtcattattgtttctgcaaaagtaaaaactgcatggctactgtgtaccagggagcctgatttatatgctctctagacatcatggtgggtctaaaggttacatagtgttcctcttgtacagaaaatgcttaaaaaccaaagttgtatcatataagaataatgtgtcacctgtttaggatcgctatacacgctctcgtttctgattcaaactcagattactgcgtacgtttattaactaagtgactaatgagaatatacactaaactttttgaagtttaccagcaagatgaagatggaaagcattttggaactttctccccatcttttgtatggcttttaaagtttacgtggaaaatgacaagattacggacatttattctccagctccataatggtcctgaagggaggctaagatgaagctctgacagaagagctgctcatgtagacagctctgtcctggagactttcagagcacattgtggtgggctcttcagttaacagtgcttacttcactaccagctgcctgccttctgacactaaaagctcttgccacgtagcttcaggagtggggatgttatctttgatctgggcagaggtattactgtaattgctaagtcttgctatttaattgtgatgtgctgcattgagattgctccagcatttgttgatgagatgcagtgaactaggaaaacaagagccttgaaagacaagataaaaaggagataggattttcagatatgcacctagtaattaagatttcatgggatgatgctttctaccttggagtgtgttttcctcctctaacagttataatagcactatttggcctttgaagaatgaagtctttttattttacataaatcacaaaacttttaatttctttttaaccgtgtgtgtgtgtgtgtgtgtgtgtgtgtttactttcaagttaacactcattcagttcctacaaaacaggtaatgttttgatatgctaaatctgtcacatatgagtgtgcatacaactagcacatgttaagtacacatattgtgcagaaattgaaggtagtatttataacagggatctgaggtcattataaggaatttaaaaaacaaacaaaaagaaccacactctcataaatgttcaacaacaatccataagcatcccttattagcatttaaataggaaatgttatactttcagcatgttttaaggggctaaattaataagtcattgctgtggtttacttccaaatttgaacttcacccaagtttacaaagtcattatttcaaacttatagttttattgttggaaagctttgtttcttcaggggagggacatatttttattccctaggtatggattatatcatcacaaagagctaggtagttctgatcacaatatttgttttacaaaactgcagagaggaaggctttggaaaacactaatggtttccggttcgttagcacctctgaattcttgagccaccctgtctgtctccaccattgcagaagtatcaagtcatataataaagccaccatcagtgctgtgctacctgggtagtcgtgcagaaaatgtatttttatgttttccttaagaaaaagtgcttgctgagcctgagagaaatggagctgtgcattcctggaaaaacctttgtgggaaacaaaaactaattagagcagtaaatgtggtgctcacaggtaattgtaaaataattattcccctttagcatcatcactgtttaattgtgctatccaatatcttcctgctctgaatccagatgtgaagggagagcagcctcctcctcctcctgggaatgtctttttcatttagtgtgagccgcacactcctcctaaaggacttgtaaaagacggaggagaacatttagggagggtttgaacagctcttctcttcccgtttgtcctcaatcatgacagaaagtgattactccaactatttctatagaaatatgattccacttatgtggctgaaatgccttctgtgagcatgtgggagatttacacgttttttagtgctaacccagaggtttatgaacattctcttttatgaactgcagattgtatattacactccatgttcttcagattaagagagtcctattttcagatcaactgacaatttagaatgtgatgataataaatatgtaatcccttggctttcagaatggtgtatgagtacacattcagatttgggtttaattttaattatttcagttaacgaaggtctcagcaaactcggtagaaaagattacatacagctttgttctaaaaacacagatttagactctgtttagaataaattataacacatcatttcagttgattctgtactgttctttcattcttatgtagctttaaggtcagattagttgaaataatttgtacttcctttaggtcagcatcagggtgggaggcgccatctgggtgaccaggtgacccaggttcctttttgaataacaatgcttttaaaatgagctatgtgtagtggtttgattttaagtgtcattagttacagaagtgtgtctcttcagtgacatggactctctctctctctctctgacgtaaccctggaaaccatggttccctactctaagagctacgttttctgatatctatttttaggcttatttaggactgaaaattttcacagtgaattttacatagtattcagaatgcagttaactttagccaatttatttgacataacttcagacagtttaaaacttttttttactatatagtatagtcctttgtattttaattttctatgctaagtccaacatcctatgattttttttttaccctaaaagacttaactttaatgctttaacttgagttcattaagttttaaagtaatcttttccaccctctccctatgaaatttttgtttttccttatctccttctgtagcaacaaagttaggccttagttttctgatataaagagactaagttgattctgagggctaaaagaggcaaaaactttatctgcttggcagtggtcagtaggtataaagtgagtatgtgtgtgcaaatgtatatttataagattccattttattgatcagaatacttcacttccttgagatatcgtccattgtgacaaaacatacttttgcttataggttattacctttataactggattttatgtttaaggagtatttcacacattgaccaaccatacactacaaattatgattactgctatccaaaggtctcagaattgtcttaacctttggcctagaccactctcttagtgggtaaatagctgggccctcaccagtgcagtgacttctttaccccttagtgggcgggcttcagtgctggagctccagctgccccacacaagatctgcatttgcatagactgggcaaagactcctcacagaagagtcatggcaataagcctgtctcttttctttccatgtctttagatctgatgctggcccgactgcatcccttgcattgtacttctttggtgccggcattattttatgcgcactatatatatatcatcagccacagcttgtagttgatgctgaatgcagttcgactgttgtgataggaatccagcacttaagctgagcatttgacaaaaatgagcattacaagagattgatgagtctacgagctcctaagaactcattagtgtaagcagagttaaacacacatgcagaacctccgctcatttgtctttttggagctgaagtaaggcactgggcgttagacaaccaagcgtgcactgggctgcagactgatgtttaagtttgtccttgaaaaattgtttgttgttgtttttgtttttgtgacagggtttctctgtatagctctggctgtcctggaactcactttgtagaccagactggcctcggactcagaaatccgcctgcctctgcctcccgagtgctgggattaaaggcgtgccccaaatttttaggagtaaaatagcagacaagggtaacatgaacaacattaaaaagggacagcatttggtaggaaactgatgtataattactttttctgcttatttattttattctttgctttcttggtactttagcctagactcagtgggggatataaaagtccatcttttaaaaaaagttttcttgatgcctttattgttttttcctagtacgtatcttttactttactcttctctgaaacccatatgattttttgacccgttcctgaatctcaaaggattgtatgcatgactggcatagtcctcagaattggatttttgagagacaagaatcaaaattcctatatcagccctgggacagctgcatatttctgtgcacaaatctctattttgacttcctgtattatagaaggggtgttgagttttggggttgaacatacgggtaacgtatttcagagtgactaactttatggataccattgtcttggccagctatatttgactatgctgcagctgtgtttgctttctcaaaattgtcaccaggaggcctccagctgcaatcgttcactaagtccgagccaggagcatctttcctcaggatttgctttatctagtagatcatcttttcagtattatcttctagagataacacatgaaccctccaggaagccagagtactacaggtgctgtttggtgtggataattctatatcaaaataatctcctaatactaatctttctgtttattcataatcatatctaccaggattctttcttttcacaccacgattatattttttaactcctagttcctcattttctttcatgtttgtttagatgttgaggaattgtttacaacatctgctgatgggtggtatgtctttctcttctcaattactaaagcattttagaatgcatcttttactgacttctggtgccttagaaacctctaacagtttggattggagccacaaatctttttattcaattggcattaccatcaatttagttttcttcataagaacttagagattttttccctaatataaagcaccatatttctatggccacaggtgggtttcatttttaaataaaaataacttctcttgtattgttttggccatcagggatgcttgctttggtatggtagtctctagagtctcttcagtccagtgtggctaggtatcctttatttcatttactccaggctcctgctgagttaaattttaccttggtttgtgccagtatcttccaagtctcaattgcctcaccagaatttctcaacaagaaaatatgggtaatagcttttcaactgtcacacacttttattgtgagactaatttggaacaagaatgacaacctaaatattttgtagtttcatagtacttgaaactgaccacacattctcctgtttcttgggagcgtcaaacataatggagcctcattataactgagctattagtgcttttcatctcagaacatttatattgtaaagtctcaggcagagagccatgcgacaatattgttcccctataaactttcaggaaatgctccgtgtccagcacaacattatgatgactgatttttttcatcttctttccgaatgatgatagagaaatataatacagtttatgttctaactatgaacttctgctcagacctcccattctgggatgagataatgccaaagcaatatctttattcagtatcctgatatatacagtcttaaagctcatctctacacttcctgattgagattgaactttcttaggattaaaataaaaagacaggtaagcagtgttaaggttggttctcaccttgcaccccttgccttttagaaacccaggcatctgagttgcaatgtggaagggaagtagtgtagctcctgcaactcaatggcctcattagccaccgctctggccacagcatacctgaggaacccaaaggaaaaaaatagtgattttttttttttttttttaacagtgtggcccaggctgagccagtgagcagtgtgtgagctatttgatgcatcaagctgttaaccagctgctgacggattcttttctctttgtacttaagaaagaacttcctccttctccagacattgttgatagatacttagagtcctaagagatcagagtaactgtcatgtgaacgtttgatcccgaggcaacaaatcacctgattctttaagatcagtcatgaccacttttcttcagaagctaaagccttagaatgtgaaccattgcctaggaagttgtctctctaatgggccagggattgtctcttctgtggagaaactctataagctatggaagtgacctcacaaacagtctcttgcctcctagggcagagcatttcctgtgtaaggtgagacagataaggacttttaagtttgtcaggaaagcaaaaccagggccctggtgggaagctggcagatctttagaaaagggggctagtccctcagatactgtttctatgtgaactaatcagttctttggaattggcgcatttaatcagtgtcaaagaagtctaatttgctttaaaggcagatcttcatttgggccaagatatttttaaaaagcaactaaagttggattattgacagccaaagaggttgttatgcaagccatattagtttgctgctatatctcatatatatcttcttgggacataatattttaaatacggattcatttctagttctctgttcactaaaataaccatatagacccagaaggaaaaaaaaaaggtctattagtgtcaacaaaactcattctatgatgtttctttctttctttgtttctgtcagcaaaactaattctctgatgtacctcctttccttccttctttctttccttccttccttccttccttccttccttccttccttcctttcttttttttctttctttctttctttctttctttctttctttctttctttctttgtgataactaattctttaagggatccattctatagataaatttccaaacttatttatgatcttattttttatttatttaggatacactatggtttaacaattaggctaatgaaattaacatattagtaatgaaaaaatgttttgcaggttaagtgactgaggttcagtaaagtgggcatgctgtaaagccatgcatgtgtttcctttgcgtcttcccgaagcctgcagcttctgattgtctctccctggaatttaaacctagaggttgctctaagacttttgagttcttagctcttttcaaggctgaaaacaggtagtttcctgcaagtgttgatgacaatgtatgtggattttgaatattaaataaatacaatttcttttttcttccttttattgacaatagattttttttctcacttaacatcagctggttacagtttcttctgcctctactgctcccacttcctctcctctccacatctgctccccttagggctcactagagaacaagcctctcaggtataataacaaagtaagaaaaagtaacccaggattggacaaaacagacagaaggaaaagaacccaagagaacgcccaagaagtggacccactcattcacacattcaggagtcccataaagccctatctaaagtcctaatgtgaaagtaaaggacacggtgcagagatgtgccgggccctgtgcgttctgcttcagtcttcctgtgtgctttgcttgtgcggatttagagaccttgttttcttggtgtcctccatctcctctggctctcacattcttcatgcctccttttctgcagggctgagaggaggaattgatggagatatttcatttaaagataaatgttccaaggttctccctttcgtcataatgtctggcaatggggttctccgtatttgttcccacctgctgcaggaggaagcatctctgaatattgctgagcaaggtggtgatctatgagagcagcagaatatcattagatcattagaaggagtcatttattgctactcaattttttttttctttagactagtagtatttggttttaccctgggtccatagactatttagtttcaggttcttggtgacccaagcaacatcaggtatgggtttcatatcatacagtggactttaaattaaatcagataatggctggttactcctacaaactttgtgccaccattgtgctagcagtatcttgcatacaggacaccattgtagatcaaagggtttgtgactgggttggggtttacatttctctttaggttgtgtgcagagcaccttcctatttcatgttcaatgatttcagcagtgggcccttgcagtcagttgtgaggaataagctatagtcttggtgacagcctgggtcatttggggatccccttgggatctctttagccaacaactcagttctatgtaacctgattccaatactgaaagcttcatttaaagacaagaactgtccagttgggactctgtctcccccattttggcaatttcatttagatcccctgcatgtatgtatatgttttaagaagcttctaccgtattaggcttctatactataagatggcccttaattttagttgactctccttgtattccctctcttgttcctctttcccatccctacctgatccttccaatccatctcccccatcttttttttaatggctgagtagtactttattgtgtaaatgtaccacattttctttatccattgtcctgttgagaggcaactaagttgtttttgatttctgcctattataaatagagcatcaatgaacatggttgagcaagtatggtaagacaaaatgacatttgggtgtctgtccaagagtggtagagctggatcttgaggtagattaattcccatcttcctgaggaactgccacgctgatgtccaagtttgcagccccaccaccaatgggtaagtgttcaccatgctccacagcctcaacagcgtgcgctatcactttttaaaattgattgtagccatttatcatatgtgtagttgaaatctcaatgtagtttttgattttcatttccctggtgactgagaatactgaatatttcttcaagtgcttcttggctatttgcaattcctctattttaaatactcttgtttagatctgcactccacttttaaattggatcttttgttttcttaatatctagattttggaattctttatatattttggatactattcctctattagatgtgcagttggtaaactctttcccattctgtagactgctactttatctggatgacagcatcctttgccacgcaggagcttctaagcttcttgaggtcccatttactaagtgttgaccttagtgcctatgctaacagtgttctattcagaaagtctttttctatgcctctgagtacaaggctgttacccagttttctcttctatcaggttcagtgtatctgattttatgttgggggtctttgatccttatggacttgagttttgtgcagtgagaagtgtagatccatttgaattcatgtacatgacgccatctggtttcaccagcatcgtttgttgaagatgctgtcttttttttttttttcccaatgtgtatttctggcttttttaatcaaaaactagatgttcataggaatgtggatttatgtctgggtcttcaaattgattccattgatcaatgtatctgtttttgtgccaacatcatgttttctatgtactatagcactgtagtaaaacctgaaattggggatgttaatacttcccttggttcttttattattaggattattttagcgattgtggaggttttgtgttttcatatgatgctgaactttttcctttcaagatctgtgaagaattatgttggaattttgatggagattgcattcaatctggagattgcttttggtaaagtgaccatttttactatattaatcctcttaatccatgagcatgggcgatctgtccatcttctgatatattctttaatttctttatttaaagtattttaaagtatttagtttttatcgttcatgtattttactgctttgttagagatatcacaaggtattttatattatttgaggctgctgtgaagggtgtttgccggatttctttctcagtccatttgtcatttgtgaaaagaaaggctattggttttgtgagttacttttgtatacagctactttgctgaaagtgtgtatcaactgtagagtttctggtggaaatcatagtctctcatgtatactatcatatcatctgcaaataaagatactttgacatcttcctttccaatttccattcccttgttctttttcagttgtcctattgttctaactaaacaagtactgtggtgaataacagagagagagagagagagagagtgtgtacagttttgttttgttccagattttagtggacctgctttaagattctatccatttaagttgatgttggctgtaggcttcctttaaataccatgtttcttttatctctagtcttcctaggatttgtatcatgagggagtgttgggttttctcaaagtccttttctgtgtataatgagaagatcattttttgtctttgtttatatggtagagtatatttatcaatttatgtatgttataccttgcatatctgggatgaagtctaattgaacaccatggatgatatttttgatgtgttcttgggtttagtttgcaagtattgagatttttttctttaatctatgttcataagggaattggtctgtaattctttctttgttggctctttatctagatggagtatcagggtaactgtggcctcataaaataaattgggcaatgtcccttctgtttctgtttttttggaatagtttgaagagtgttgacattaagtcttctttgaaagtcatgtagaattctgggctaaagccacatggccctggaattttgggttagtagacttttaattactgcttctattccatcaggggttacagttctgtttaaatgacttatctgatcttgatttaactttgataactggtatgtgtctaggaaattatctactattttagattttacaatttgatggagtataggtttttaaagtacatctttatgattctctggatttctttggtatcttttatgtctcccctttaatttctaattttgttaatttagattttctctctctgctttttaattaatttggatgagggtttgtcaatgttactgatttttctcagagaaataactctttatttcattgatttttgtattgttgtgttaatgatttcagtcctaagtttgtttttttgccatctactccttttggatgtaatttcttctttttgttccagaacttataagtacgctgttaaattaatagtatgagttctctccacatttttatatagggatttagagctatgaacttgccttttagaactaccttcattgtatcccataagtttggtgtgttgtatgaagtctttaatttctttttttttcttattacatattttcctcaattacatttccaatgctatcccaaaagtcccccccccccactcccctacccacccattcccatttttttggccctggcgttcccctgtactggggcatataaagtttgcctgtacaatgggcctctctttccagtgatggccgactaggccatcttttgatacatatgtagctagagtcaagagctccggggtactggttagttcataatgttgcacctacagggttgcagatctctttagctccttgtatactttctctagctcctccattgggggccctgtgatccatccaatagttgactgtgagcatccacctctgtgtttgctaggccccggcctagtctcacaagagacagctacatcacggtccttgcatcaaacgcttgctagtgtatgcaatgacccatttaaaaaaaaatatcagtagtgagttgttcagttttgagttttcaagctttctgtggtttctggtgttgatacccagatttaatccatgatagtcagttaggatgccaggttttatttcagttgtctagtatctgttgagacttgttttgagtctgagtatgtagttagctttgaagaaagttctatgagtgcagagaagaaagcatattcttttgtgtttggatgcaatgttctgtaaatatctgttgggttcatttagtctatatcatcagttagctccaacatttctgtatttagttttgtctgcatggcctgtctattggctagagtcaggtattgaagtctcccactgtcagtgtgtgaggatcaatatgtgatctaagctgtcttagtgtttcttttaagaatttgggtatcctttgtttggtattcagaagttaagaatggcagtgtcctcttagtggaatttttgttttccactgagaatgtaaaattcttccctatcttttccgagatacaaaaatggctatatctgattgctttgtaagtctgtttgcttgcaatatccttttccatccttttaccctgaggtaatgtttatccttgatgttaaggtgtgtttcttggctgctctagaaggatggattctctatttgcatccattttattctgtgtctttttaatggagaattgagaccattgatgttgagagatagaaatgtgcaatgtgtgttgaccatggtgtgtgtgtgtttcctggtctggggttatttactccttgtgttttcttgggtgtggtcagcctccttaggttggagctttccttttgtgctttctgtaggtctggatttatagacagacattgattaaatttggttttatcatcgaatgtcttattatctccatctattttgatggaacatttttttatgggtgtagtagtttgtggtcccttattgtttgcagcacatctgtctgagcccttctgcttttgcactccattgagaagttgggtttttccttgcagcttcaatattatttatattttgtatgtttagggtttttttgattattgtgtgccaagaggactttctggtccagtctgtttggtgttctgtatgcttctttgctggcatctctgttaggttagggaaattttcttctgtggctttgttgaaaatattttctgtgtctctcacttgggattcttctccctccctctattcttattattcttagattgattttttttttcagtgtcctagatttcctagacgttttgtgccaggatttctatatttaactaagtacaatttcatagttgtaaccaacactcttgtgtgtcttttttaaaaaattcttttctgtcaaatgcctttttattttctttcatagcaagacacgacttttagtgtgtaaagcaatagtggtatagctgtgtcagtggaaaaggggaccatattaatgtcaagaactatgtgtctgaggtagatgcttacctatttgagattaaaaaacaaaccttaaatgtgaattctttttccaaacttatggttgtgtattttatcaagagttttcttttaagaatttactagatgctggaatttcactctgagagatgttcttccacctcgttaatatttgcatttgatttagatgaacagttgatttttttggcaggtggaggttacctgtagctctgtagcttatggattagcaaaagctcacaagcagtgtttggtccctatcctctccattagttggcagttttacacagtatcttttctagagttagaaccattcttaatctcctcaaatgagccatcggttagtcagtaggttaagtgaaatctaaacaaaatggtttatctacacagctcatgtatgggacctgtttcacatcaggtgtcattacgctcccctttgatcctttctggggcgtagcttttcctcaagtggataagcttttagttggatcctgcgtttctaggaaaccataagtttctatcatttctttaacactgagtggctataagagtttatagcaaagttagagaagaattcatgcatgtgttgatccaaactactaacgatttcataccaaatattagcttgtagaactgcctttacacttggcaggagacaacactgtaacctaagaggatgtgattggagtggggttttcatgccccatgtgcatattgtattcttgctactgatgcaaacattatctataattacattttcaagtgactgaaaattgcaggctttgttgaacaaaaatacagccaaagaatggaatgtatatccactctgtcctcattatagggctttcagaaatcagactataaggcccaataccatggctctcaactgtgtgataccaactccattctctgatgtttgaacactttgtcaaaatgccgggtttccaatgatgatcgtgtaattggaggggaatgctattattcctttagtgcttcatttgctgtattgtcatcccaatcaccgtagcatctactcacacagatcttctgtttctaggatgtaaaatataaaaccacaatttagtttagctttaggcgcaaagggcaataaagaacatttgtttaggtacagatatttttgccttcctggagaaggtacagttgtattcttctgactgttgtagttgtaaatcccagccattgtggtaccactgattaaaacaccaaaacgctcctatagagacccagtgcattgtgggttcttcccttcttagaatctggcccgtgtacaagagaaacatcccacctagtttcatacttcaagacacatacttcaaacatcatttctagcagcagtgagaatctaaaccatttggatttttaaaagtaaagagagttagatataatgcagcttatattttgttcattgttgttcatgattttaaaatccatgaaatacaaaatgtgtcttggcttaaagtagaaaacttacaggaagaagttatgattttgttgttaatttgtttttaaagaccaattttacagtccttctgccatattttggcattatcattcaccttccaatctatactacagcctaaaactgttgaaaaaattaaagaaaaaaaaatactgtgatggttttatttcccaggagcagcaaaacagaaaaacaaggttgttccaaaaactcacaaactatttctgagtcttttgtttttctttcggacagattagcaagtttgttatcaaatgaagaaatatttattggatcagaattaaatgattgcatggttagggctggtgtacatacattagatttccaatatgaattttgaactatcttttcaaacaaaattataaggtacaatatatgttctgttttgaacagaccattttatagactactatgaaggtttccaattacattatgtatttttaacatctgtagaactgaaataagaaaaccagaaattgaataaaaggttatgtatgtaatacaacttccctgcaagggtctttgttgtcgttattccttttgagatgtaaatgtatccttacagctttgtaggtaagctctgacagtaaatactctgagagacaggcaggttttataattgccaattgtaaggtgtaagtgaggacaactcgaattatctatttcttaaggttcctctatgaatcagtcagtctcgcccctcccctcctcctctccttccttttcctggattgcctttcttgataggttgtatttttgtttctgagtatgtgagttcttgatagcttagattctgaaccaatcagcagaactcattttaagaaatgcaattagcccagaactaaagtatattagcctttaaagttatctaattttccaggtttcttgtgtgcctctatagtagcaaactgattgtactgtggtcttctaaaaacagtacaagccagaaactacactgtaataaactgcagtttgttctgcagatggactagttagcattcagttggatagctgaagaatgtttagaagtcacactgacctgttaagctgaggtgtcacctgttttgtggaaataaactaagtatctgtttgtactggactctattctttttatattattttatagtgcttgccaatgaactgctacatttattccaagtttaatacttcacacattcaaagtctcacatggattggatgtttactgacttctagatcttctaagagtttgtaaaaggttctcagagtacaggcattaaacaggaggatattctgaggtttagcctgtgaccttcagaaatacttgtatcttcttcagggagacacttaattcatcaggaaggatcttcagcttcattttgtttaagccatgttgaattattccaggttttcttgttgaaccttcctaactttccatagagcttgattttttttttttcaaaagagtaatttcacactttgtccaaaagtgctgtaatatcccatacattgtacactaacttagaaaaataattaagttgaaaaatttgcacatctttaagctcaagagaaaggcagtgtggggcatgtatatgtggtctgcacacatgtgggaggacacagtctatactctacctttttcccttgatatagggcctcccactgaacctggatccaggctgacagcctgcaaatgccccgggtccttttagagctgaggtcataggccttttatcaacatcaaacttttaacatttggtcttgcccactcctcatgtgtgtgccgcaagctccctcacccacaagccatttcccagattgggactttcactctttaacctacagatcatgtgacattaatattacattggcacatcatatttgtaaaaataattaatatattacttatcaccaagaccactggaaaaaatacattgtctccatgacagtgttcatgtacgttagtacttttgtgatcttggttcagttagcttgtgatagcaggaagtcaacatcaatcaaaagtgggaagattatagttcttcctatctgaaaaatcgatgagagagtagtgtccttcccactgggtcagatttgagtcttctgggacccacaggattagttgtgtgagcaaagaggaggggatttttgtctggtccatcttttgctccctgaacttactttagaagacttttttttaattattattttaatagtgattgagaacaagaaggcacaaatggctgaaaataagaagaggggagagccaccacttacttggcattcagttaggacctccagttctctttcacattcttagcattaaagacacagtgatcgtgtgtcatgctctgctagggtaatcccagcttgtcactgttgtaccaatgccatcttcaactgtgtactccttcgctctaaaaactgacctggtttgaatgataggcagtggtaccccatctcaggtacagctctgtcactagcttttgtagctataaaggtgtgctgactgccaaaaacagatccatgatgttaatacagacctttctacaaaaatgttcaggaaaagatatttttttttccattttttattaggtatttaactcatttacatttccaatgctataccaaaagtcccccatatccacccacccccactcccctgcccacccactccccctttttggccctggtattcccctgtactggggcatataaagtttgcaagtccaatgggcctctctttccagtgatggccgactaggccatcttttgatatatatgcagctagagtcaagagctccggggtactggttagctcataatgttgttccacctatagggttgcagatccctttagctccttggctactttctctagctcctccattgggagccctatgatccatccattagctgactgtgagcatccacttctgtgtttgctgggccccggcatagtctcacaagagacagctacatctgcgtcctttcaataaaatcttgctagtgtatgcaatggtgtcagcgtttggatgctgattatggggtggatccctggctatggcagtctctacatggtccatcctttcatctcagctccaaactccgtctctgtaactccttccatgggtgttttgttcccaaatctaaggaggggcatagtgtccacacttcagtcttcattctccttgagtttcatgtgtttagcaaattatatcttatatcttgggtatcctaggtttggggctaatatccacttatcagtgagtacatattgtgtgagtttctttgtgaatgtgttacctcactcaggatgatgccctccaggtccatccatttggctaggaatttcataaattcattctttttaatagctgagtagtactccattgtgtagatgtaccacataggaaaagatatttttatcttctctctaattaagcaagcagagctgtgacaggctttccattattgtttctaatgtgttagcaccctgcagggcactttaccatttgccatttccttaggttggttttattctttaacccagatcctttgtattggaaatttgggggaataactttctgttcacacccttcccctttcccagcttcttgatgaaggagcctgaaagtaagaaaaggttagaggaaatcttattcacttgaagtcatgaaataacttttcctcattctggaaagttcagctaggaagctgatgactgtcacctcaagcgtgaccagagtcagatcctctcagatgatcctgcctttgtttgacctcacactgcccttcctgaaaccacaacacaagagctcagttgagggataaagaccccaggctgcccaggttcatttttggattttaatccctgggatactttctcactctgtaatgtcaagttatctttgttgtacagtactagaatttcagaggatttgtgaactatgtgtgtttaaaattgattttctgatttttacatttatacccagctgtttgttattcagtgcagccatcagcatgagtctcaatggaccgtgtaatgtgcagctgtagccagacgtaatggttcctctccctaaatgttgctgttagaagcttagagaggcaggctaaagactgctgataaccatgttgcctgcattaatttcccctctggagctacacaaatctgcttggcaattttatttcatgaccaacaagcagagcaatgtttgtgatctgagtccctggtagtaatgttgacagtgtatatcaaatccatctgcattgatatgaaaggtacttgtacagctaattcaagctgcaggaagctgtctgatctgcatgcataaatacactagaagcaagattatactttggaagcatcagccaagattcaaataaaagcctttgcctagattaaaataggtccataaactagttccttgaacagagtttttttttttttcagaaaaataattttatgatcattttttctttaacctctatagtcaaatcttgtttttaatttgcatttattattcaagtctgtgttttcttttgtgtttatatgatgtatccttgtttagaagctagagtttctattaaatttaattacttcccttcaaggctttaaattgagggcagattctattaattgttaattactttcctctgccgtttacacagtaaaggtacagttactaattgagggtctgtgtggtatagtgacaggtagcttcttctatctcaatatttatctttatggatacatgctttttatttctctactcttttattgatacaaaagtaatacatttaactgatatattggccattattatggtctagtgtccttacatattatagataaataaatggcaattatgtttgactctatgttgccatctggtggtatgttgatctccttttgacctgcctaggcctatctccaatgggaagatggtgtcctgaaactattacttaggcagttttaccctccagtccctcactggtggatcacagggagagggagccttactgtcagaggacagggtcattctctcacgtctgtaattgtctccttaaatgcttcgtgctccctttctgtttactcctcgcacccccattggttttgcctgagtaagagctgctttgtctcttaaccctttttcctttttcagcttccctctagtgaagacacatctaccatgtctagactgaagaggaatggagtacaggtgtgattctttaacatttgacatttttatctgcttgtctccccatgagctgttttttagcctcagtagctaggcttagaatcagcctgggtcaggtttgcctgcttattgatagacattcctgagttgccagagtctcatttcaacggtctattaaaagcattgcagtttcaaccaagtttagcttactaaaactgaagatgctcatttacttgactcaagagtctctaagataaaaggactttgtgaactagcttgagttcatttctcactgacatttcattactcaacttaaaatgagtttgctgtgatacttagcttttatattgtgttctgttttcacatgctcctaaaggtttcttggtgtttgtcttcttgtttttcgactgggtctcaagtccttgtttgtctggaactctctatgtagataggcttgccatgtcctcagaaagacctgcttgcctctgcctctcacatgctgggatcaaaggtgtgtgtatcatagttagattttaatttttaaaaatcataaatgtggatatcaggttgaattaaagtagtaaataaaaacatttttctcattttattttggaagtaggttgttttaaacaactttctcatttttattagattttgcaaaaataccctgtagtacttaggcttctgagtagtagttaagttagcgcacgaagctgccatccctgtagtgatgacagaagtggagggatggagcacggaagaggttttctctgtgcccgtctgtgtaagcggcagtgggtgcctctgggagaactcagctgtgccagcaaggatgaccgtgagaacagtagacatgtagcatcatttgacagtaattaccctgtccaccacctgtaccttcttttcttaatagactctctttgtagtctctggactatattctgaagagaaaattctaagacagcgcacatctaaggtggtttgcagtgtagtactttgccaagttgtgctggccgaggtgtgtggtgtgtgaaattgaatggtctttcaaactgagctgcttattaagttattgatacaggatggttgtcgacttaggcgaggtatggagataatctattagaaagtgattactggacaaccaaaacacaacacaataatacttattgtactaggatggataataagattcctgacaggctttttttaacaggaaaatgttgtgtggtacacagctataaaaatggtttctagagcaaaaagtaaaatatccactttgcactgattttgtatatattacacatataagttatgtgtcaatcataaaaaaatcatacataaattataaaagtaggacacattgttttttcttaaggattgtgattttcaaatgagctatatggccttagtatatatcccatcccaaactattttattatgatgggcttgaaatcataattattttaaattgtactagttgactttatttttattaaaacatttctggtagtaatgatgcttacttattaaatgggattttagagcttaaaatgggaaattttaaactggacatggtggctcatgctgtagtgataaaaattaggaaactaaggcagaaggatttctatgagttcagggccaacttggactatatacagaattccaagtgaagaccaaaaagaatgaatcaggaaagttttttgttttgttttgtttttgagacagggtttctctgtatagccctggctatcctgtaactcactttgtagaccagactggcctcgaactcaaaatccacctgcatctgcctctcgagtgctgggattaaaggtgtgagccaccatagcccagcaggaaagttttataaaacattctaagctgagtgtttctttgtgtccctattgccctgacttgtgaatgtccacataggtgtccacactgccctttaatggcattgactgtataatggcagcattactcttgtatcatctctcccggtagtcctgagtagattccagggtcaaagtgaatcttgggaccacagctcttggtatcctgtatcacatagaagaaggtgaagatcaaagagaaatagagaagccatactgctggtgttgaagtgaacagatgttaacagagtgcctcctgtatactagaatttgtgatatggaggccaaaagcatctgaccagggctactcttagtacttctggctggagtctccttattactcctgctacttgtatgtattcagcttgagagcagggactgctgtaattacagtatagatcaaacatgccacaagattagcactctaattagtctttaggatttgtttatttacatcaggagacttcataacttgtttcatatttgtctgggtacacttttccttctttttgtagcatgtataagcttctagattcatattattgaaaaatattatgctttttaaaaatggttaaagccagtcaatagaagatatattaaatgcacattataactttgatgacgaaaatggaaacttatcaccattaaggctaattaggagatagataattatctattaaattttacactatatactggttgacactggaagaaaacacaggctacacaatccaaataaataggtagataaatgtcttaattcttttttttttttttttcatttattttttaattaggtatttagctcatttacatttccaatgctataccaaaagtcccnnnnnnnnnnnnnnnnnnnnnnnnnnnnnnnnnnnnnnnnnnnnnnnnnnnnnnnnnnnnnnnnnnnnnnnnnnnnnnnnnnnnnnnnnnnnnnnnnnnnnnnnnnnnnnnnnnnnnnnnnnnnnnnnnnnnnnnnnnnnnnnnnnnnnnnnnnnnnnnnnnnnnnnnnnnnnnnnnnnnnnnnnnnnnnnnnnnnnnnnnnnnnnnnnnnnnnnnnnnnnnnnnnnnnnnnnnnnnnnnnnnnnnnnnnnnnnnnnnnnnnnnnnnnnnnnnnnnnnnnnnnnnnnnnnnnnnnnnnnnnnnnnnnnnnnnnnnnnnnnnnnnnnnnnnnnnnnnnnnnnnnnnnnnnnnnnnnnnnnnnnnnnnnnnnnnnnnnnnnnnnnnnnnnnnnnnnnnnnnnnnnnnnnnnnnnnnnnnnnnnnnnnnnnnnnnnnnnnnnnnnnnnnnnnnnnnnnnnnnnnnnnnnnnnnnnnnnnnnnnnnnnnnnnnnnnnnnnnnnnnnnnnnnnnnnnnnnnnnnnnnnnnnnnnnnnnnnnnnnnnnnnnnnnnnnnnnnnnnnnnnnnnnnnnnnnnnnnnnnnnnnnnnnnnnnnnnnnnnnnnnnnnnnnnnnnnnnnnnnnnnnnnnnnnnnnnnnnnnnnnnnnnnnnnnnnnnnnnnnnnnnnnnnnnnnnnnnnnnnnnnnnnnnnnnnnnnnnnnnnnnnnnnnnnnnnnnnnnnnnnnnnnnnnnnnnnnnnnnnnnnnnnnnnnnnnnnnnnnnnnnnnnnnnnnnnnnnnnnnnnnnnnnnnnnnnnnnnnnnnnnnnnnnnnnnnnnnnnnnnnnnnnnnnnnnnnnnnnnnnnnnnnnnnnnnnnnnnnnnnnnnnnnnnnnnnnnnnnnnnnnnnnnnnnnnnnnnnnnnnnnnnnnnnnnnnnnnnnnnnnnnnnnnnnnnnnnnnnnnnnnnnnnnnnnnnnnnnnnnnnnnnnnnnnnnnnnnnnnnnnnnnnnnnnnnnnnnnnnnnnnnnnnnnnnnnnnnnnnnnnnnnnnnnnnnnnnnnnnnnnnnnnnnnnnnnnnnnnnnnnnnnnnnnnnnnnnnnnnnnnnnnnnnnnnnnnnnnnnnnnnnnnnnnnnnnnnnnnnnnnnnnnnnnnnnnnnnnnnnnnnnnnnnnnnnnnnnnnnnnnnnnnnnnnnnnnnnnnnnnnnnnnnnnnnnnnnnnnnnnnnnnnnnnnnnnnnnnnnnnnnnnnnnnnnnnnnnnnnnnnnnnnnnnnnnnnnnnnnnnnnnnnnnnnnnnnnnnnnnnnnnnnnnnnnnnnnnnnnnnnnnnnnnnnnnnnnnnnnnnnnnnnnnnnnnnnnnnnnnnnnnnnnnnnnnnnnnnnnnnnnnnnnnnnnnnnnnnnnnnnnnnnnnnnnnnnnnnnnnnnnnnnnnnnnnnnnnnnnnnnnnnnnnnnnnnnnnnnnnnnnnnnnnnnnnnnnnnnnnnnnnnnnnnnnnnnnnnnnnnnnnnnnnnnnnnnnnnnnnnnnnnnnnnnnnnnnnnnnnnnnnnnnnnnnnnnnnnnnnnnnnnnnnnnnnnnnnnnnnnnnnnnnnnnnnnnnnnnnnnnnnnnnnnnnnnnnnnnnnnnnnnnnnnnnnnnnnnnnnnnnnnnnnnnnnnnnnnnnnnnnnnnnnnnnnnnnnnnnnnnnnnnnnnnnnnnnnnnnnnnnnnnnnnnnnnnnnnnnnnnnnnnnnnnnnnnnnnnnnnnnnnnnnnnnnnnnnnnnnnnnnnnnnnnnnnnnnnnnnnnnnnnnnnnnnnnnnnnnnnnnnnnnnnnnnnnnnnnnnnnnnnnnnnnnnnnnnnnnnnnnnnnnnnnnnnnnnnnnnnnnnnnnnnnnnnnnnnnnnnnnnnnnnnnnnnnnnnnnnnnnnnnnnnnnnnnnnnnnnnnnnnnnnnnnnnnnnnnnnnnnnnnnnnnnnnnnnnnnnnnnnnnnnnnnnnnnnnnnnnnnnnnnnnnnnnnnnnnnnnnnnnnnnnnnnnnnnnnnnnnnnnnnnnnnnnnnnnnnnnnnnnnnnnnnnnnnnnnnnnnnnnnnnnnnnnnnnnnnnnnnnnnnnnnnnnnnnnnnnnnnnnnnnnnnnnnnnnnnnnnnnnnnnnnnnnnnnnnnnnnnnnnnnnnnnnnnnnnnnnnnnnnnnnnnnnnnnnnnnnnnnnnnnnnnnnnnnnnnnnnnnnnnnnnnnnnnnnnnnnnnnnnnnnnnnnnnnnnnnnnnnnnnnnnnnnnnnnnnnnnnnnnnnnnnnnnnnnnnnnnnnnnnnnnnnnnnnnnnnnnnnnnnnnnnnnnnnnnnnnnnnnnnnnnnnnnnnnnnnnnnnnnnnnnnnnnnnnnnnnnnnnnnnnnnnnnnnnnnnnnnnnnnnnnnnnnnnnnnnnnnnnnnnnnnnnnnnnnnnnnnnnnnnnnnnnnnnnnnnnnnnnnnnnnnnnnnnnnnnnnnnnnnnnnnnnnnnnnnnnnnnnnnnnnnnnnnnnnnnnnnnnnnnnnnnnnnnnnnnnnnnnnnnnnnnnnnnnnnnnnnnnnnnnnnnnnnnnnnnnnnnnnnnnnnnnnnnnnnnnnnnnnnnnnnnnnnnnnnnnnnnnnnnnnnnnnnnnnnnnnnnnnnnnnnnnnnnnnnnnnnnnnnnnnnnnnnnnnnnnnnnnnnnnnnnnnnnnnnnnnnnnnnnnnnnnnnnnnnnnnnnnnnnnnnnnnnnnnnnnnnnnnnnnnnnnnnnnnnnnnnnnnnnnnnnnnnnnnnnnnnnnnnnnnnnnnnnnnnnnnnnnnnnnnnnnnnnnnnnnnnnnnnnnnnnnnnnnnnnnnnnnnnnnnnnnnnnnnnnnnnnnnnnnnnnnnnnnnnnnnnnnnnnnnnnnnnnnnnnnnnnnnnnnnnnnnnnnnnnnnnnnnnnnnnnnnnnnnnnnnnnnnnnnnnnnnnnnnnnnnnnnnnnnnnnnnnnnnnnnnnnnnnnnnnnnnnnnnnnnnnnnnnnnnnnnnnnnnnnnnnnnnnnnnnnnnnnnnnnnnnnnnnnnnnnnnnnnnnnnnnnnnnnnnnnnnnnnnnnnnnnnnnnnnnnnnnnnnnnnnnnnnnnnnnnnnnnnnnnnnnnnnnnnnnnnnnnnnnnnnnnnnnnnnnnnnnnnnnnnnnnnnnnnnnnnnnnnnnnnnnnnnnnnnnnnnnnnnnnnnnnnnnnnnnnnnnnnnnnnnnnnnnnnnnnnnnnnnnnnnnnnnnnnnnnnnnnnnnnnnnnnnnnnnnnnnnnnnnnnnnnnnnnnnnnnnnnnnnnnnnnnnnnnnnnnnnnnnnnnnnnnnnnnnnnnnnnnnnnnnnnnnnnnnnnnnnnnnnnnnnnnnnnnnnnnnnnnnnnnnnnnnnnnnnnnnnnnnnnnnnnnnnnnnnnnnnnnnnnnnnnnnnnnnnnnnnnnnnnnnnnnnnnnnnnnnnnnnnnnnnnnnnnnnnnnnnnnnnnnnnnnnnnnnnnnnnnnnnnnnnnnnnnnnnnnnnnnnnnnnnnnnnnnnnnnnnnnnnnnnnnnnnnnnnnnnnnnnnnnnnnnnnnnnnnnnnnnnnnnnnnnnnnnnnnnnnnnnnnnnnnnnnnnnnnnnnnnnnnnnnnnnnnnnnnnnnnnnnnnnnnnnnnnnnnnnnnnnnnnnnnnnnnnnnnnnnnnnnnnnnnnnnnnnnnnnnnnnnnnnnnnnnnnnnnnnnnnnnnnnnnnnnnnnnnnnnnnnnnnnnnnnnnnnnnnnnnnnnnnnnnnnnnnnnnnnnnnnnnnnnnnnnnnnnnnnnnnnnnnnnnnnnnnnnnnnnnnnnnnnnnnnnnnnnnnnnnnnnnnnnnnnnnnnnnnnnnnnnnnnnnnnnnnnnnnnnnnnnnnnnnnnnnnnnnnnnnnnnnnnnnnnnnnnnnnnnnnnnnnnnnnnnnnnnnnnnnnnnnnnnnnnnnnnnnnnnnnnnnnnnnnnnnnnnnnnnnnnnnnnnnnnnnnnnnnnnnnnnnnnnnnnnnnnnnnnnnnnnnnnnnnnnnnnnnnnnnnnnnnnnnnnnnnnnnnnnnnnnnnnnnnnnnnnnnnnnnnnnnnnnnnnnnnnnnnnnnnnnnnnnnnnnnnnnnnnnnnnnnnnnnnnnnnnnnnnnnnnnnnnnnnnnnnnnnnnnnnnnnnnnnnnnnnnnnnnnnnnnnnnnnnnnnnnnnnnnnnnnnnnnnnnnnnnnnnnnnnnnnnnnnnnnnnnnnnnnnnnnnnnnnnnnnnnnnnnnnnnnnnnnnnnnnnnnnnnnnnnnnnnnnnnnnnnnnnnnnnnnnnnnnnnnnnnnnnnnnnnnnnnnnnnnnnnnnnnnnnnnnnnnnnnnnnnnnnnnnnnnnnnnnnnnnnnnnnnnnnnnnnnnnnnnnnnnnnnnnnnnnnnnnnnnnnnnnnnnnnnnnnnnnnnnnnnnnnnnnnnnnnnnnnnnnntctggtgaaaaatctggtgtaattctgataggcttgcctttatatgttacttgacctttttcccttactgcttttagtattctatctttatttagtgcatttgatgttctgattattatgtgtcgggaggaatttcttttctggtccagtctatttggagttctgtaggcttcttgtatgttcatatgcatctcattctttagatttgggaagttttcttcaataattttgttgaagatgtttgctggacctttgagttgaaaatcttcattctcatccactcctattatccgtacgtttggtcttcttattgtgtcctggatttcctggatattttgagttaggatctttttgcattttccattttctttgattgttgtgccgatgttctctatggaatcttctgcacctgagattctctcttccatctcttgtattctgttgctgatgctcaaatctatggttccagatttctttcctagggtttctatctctagtgttgcctcgctttgagttttctttattgtgtctacttccctttttaggtctagtatggttttgttcatttccatcacctgtttgtatgttttttcctctttttctgtaaggacttctacctgtttgattgtgttttcctgtttttctttaaggacttgtaactctttagcagtgttctcctgtatttctttaagtgatttattaaagtccttcttgatgtcctctaccatcatcatgagatatgcttttaaatctaggtctaggttctcaggtgtgttggggttccctggactgggcgaagtgggtgtgctgggttctggtgatggtgagtggtcttggttcctgttagtaagattcctccatttacctttcgccatctggtaatctctggagttagtagttatagttgactctgtttagagattgttcttctggtgattctgttaccgtctatcagcagacctgggagacagattctctcctctgagtttcagtgctcagagcactctctgctggcaagctctcttacagggaaggtgcgcagatatcttgtatttggacctcctcctggccgaagaagaaggcccaaaacaggacctttctcagacactgtgttgctttggcagttcccaggtggtacagactctcacctaagcagactaaattcctaagttccttggagtcccgggaccaagatggcgaccgctgctgctgtggcttaggccgcctccccagccgggtgggcacctgtcctccggtccggaaggtggccggctgtccccggcccacacagggtgctgcctcagcgcctctgtgcttccgcctgttccagaagctgtcaggttctctggcgcaccctctcacctgttcaggctaatttcctaagttcggcgggtctcggaccaagatggcgactgctgctgctgtggcttaggccgcctccccagccgggcgggcacctgtcctccggtccggaaggtggccggctgtccccggcccacacagggtgctgcctcagcccctctgtgcttctgcctgttccagaggctgtcaggttctctggcgcaccctctcacctgttcagactaatttcctaagttcggcgggtcccggaccaagatggcgaccgctgctgctgtggcttaggccgcctccccagctgggtgggcacctgtcctccggttcggaaggtggccggctgtccccggcccacacagggtgctgcctcagcgcctctgtgcttctgcctgttccagaagctgtcaggttctctggcgcaccctctcacctgttcagactaatttcctaagttccaaatgtcttaattctaagtgatatgtcgaaggtgcggctggcaaagagttttgcagtgttgtccctgtgtgctttgcttttgtcaaactgagcacacacacacacacacacacacacacacatactctctctctctctctctctctctctctctctctctcaaactgagcacacacacacacatacacacatacacacacactctctctctctctcacacacacacacattctctctctctctctctctctcacacacacacacacacacacacacacacacacacaccggggtcactgagaagaataaagggtattgtactgagttgatatccttgagctgtaagagattgcttttctttttcttctctctgaaatggtctcactgcatagtccaggctggcttctaactcacaacaacctcctgtcttgtgctccacctcacctggacagctatattttatttcttttttaattgttttagagtttagtgcaacttagaaaaacaaaatttctgttattgatctggggatacatgaatttaagataagtgtaggacaagaggaagtgaagaaatactcatggcaatgcaaagcaggggaaaggtccacagtgatttttctggattctttgctgtgctcttatgtgaattgcctcccacagtgtgcagacaattcatgacaagcattgacaagttgtagatacagcgttttaaagaaacaaaataggttctctgttttataaacatactcttttatgtatcccatttgatgaagattttaatctacaatgacagtttcatagcagacaaattgtatcctataaaaataacaataacttataaaatgtttaaagtcatacttcatatgggattttatttatggagcaataagagtcagccataatcctgcatggcaccttatatcattgtagctatgctgtgtttaggtttcagcctttttccttttaggattttccatcctccagggttatatgtttctgtttcactttgtctttcagaaaaattagtttagccttgtcttccttccactcacagcatcttgctaggtaacaaaataccatggacagacagagagagggtgggggtttagacaacttatattcatttgttgcggtttgggaggctaaggagctcaagattgccatgcagtctgtaggtttgaatttggtgaaggctttcttactggcatacagagaatcactttctattgtatcctcatatgacctccttgtctaattccctttcttcctcttatgagggtgttaatcctctcaggggctcctcatctgatataatcactgtccaaaagtccccatttcctaacattggaagttataacttaaacataggagttttaggaaggttgtggatacacagtcagtcaggcagtcaatagcagacactggtagagtccatctaaaagcagatcccaggagagactaagggtcttcagtccccactgtctttggcttagcactgtgcttttaaatcagattaccagacaactctcccagacccacaagctagggctgggtatagtcaagtggtaaagcactagcctagcctttgtaagatcttcagtttgattcctcgcattgcaaacaacaaacagtatgtgtgctagatatgactgacatgagaatgtccttagacacaaaccttaggatttctgttttagaatctgggaacgagcacttagaaagctattttccccaagtccccaaaccgtcttatgaaatgtaggcaggaaagaataacagaaagtgtagatataggcagggtcaaatatgtaagatttcataattacagcatgatttatttcttacttttcttcatagattttaaatttctgtcccaattaagttacatgaaaatttctcacctgacttttaaaagaattttacagtgaagttactatacattcattcacaaaaagatagaccattttctctgccttaactcactcacagtcctgtcagactattttcaggatatagcattaattcctttgagatgcaatatatcccagagcgttgacatcctgtttaagttgatattaatcctgtgactatatctttttaaaaattctgaaaggactggtttttatgtatttggtatcttaattggtattggttcctgtagttgtctagctttcttttttttaattattatttttttctatttgtatatttcttcttttattttctttttttaaattatttttattaggtattttcttcatttacatttccaatgctaccccaaaagtcccccaaaccctctcccccactccttcccccctcccacttcttggccctggcattcccctgtactgaggcatataaagtttgcaagaccaatgggcctctctttccactgatggccgagttgtctagctttcatagtatctaccatgcaatttactgatatgaatctacccactgggacaaattctggatgttgtgttagccatagtagaatcaagggtgccaatgactttgtgggtgaaatatatgttagtatgataaaaatttcagttgtgagatgaaaataaatgggaaggggtcacatataaggccaggagatcaccaagaagcttcttttctatgtgacagaggcagttttatgtttacccctttaagacctctgttatcttctcacagtagggcctctttgtaaagaagagcttttaaaagcctaaaaactgtattatgttaaatgggctttaaactgagagctgagggttaggattctggggagctaaggagcaatattgtgttaggaggcatagtagatatgtctgtacatgaggccatagcttatacccactgttgagtggggggatgtagggttgtgggtcccgagtccactttaccacagggtatgggtgcttggggaggcaggacaaatatcctgacaacctctaggacactctcattaatgtttcttctaacaagataagatttcagtatggtttttcatttcttattctctgggaagttgtcaccatctttgttttaaaacaagcaaacaaataaaacttttaaaaaagtacaaaacccaaagtgataattcatagccatgatcttcactctactaatatgtgcaatttagttatgttttagtatgctcacaaagttgtgcagtaattacctgcattttcagaacaatttcatcacccttaaaagaaacttcatactcaataatttctacctcccagcccctctccagctgctacagcttagcaaccttcctgtaacatactgtttataattttcctgcttaccccttctgaacatttcatataatgtagtcatacaccatgtagacttctgtgtttagcttctttcatgttatagtagtttcttaaatgttaatccatacagtttatgctaatccctttttgtggtaaataatatcccatcacatgtacaaatgttacaatttattcattagttgctagacgtttaggttgtcttggctgtaagaaacaattctgctactagtattaacccatgtacaaggcttctgtaggaacttgttttcagtactgggataaaacaatagcatctctcaggctaggcagatgaagttgtacaagttctttctctgtagaccatgctgggctgaaactctcaatcattctgatcatacttcttatattaccatgcccagcaaaacattataaaaacattcatttttattgaatattagcctatggatagaatttacaggtcatgtggtactttctgagggattgccaatctattttcaatagacatcgaaacattgactatatgtgttaccttatcactatctgtgtatgagtttcagttttccatgtactttctattttttattgtctgtcccagtatcattctatgaactcatgtctccttgtcaaaaccattttttttttatgtgctacacttcttcaggaaagctgagtgaggacagaagaaaagaaagaatttagaagtatctattttgttttcttataaaaataacctgggcgtggtggtgcacacctttaatcccagcacttgggaggcagaggcaggcggatttctgagttcgaggccagcctgttttacaaagtgagtttcaggacagccagggctatactgagaaactctgtctcgaaaaaccaaaaaaaaaaaaaaaaaaaaaaaagcatttgaatagggctatggaatcagtacagtcacatttaggcatcatattatcagcatagaggagattttattaccctggggggacaagtcaggcctgcctcaggatagggcaaagacagcaggtggtgtttctgcaggagtggtgttaggagaaaaaggtagtgtctgtaaggatgagagggtaagtactgattggacaagttagccagtgtagccaaaaaaatgaattttgactgctggaccttgatgttttgatagttggaccttggtgatcagcttcagaaatgagttaggcataaggaaatggccaaataaggggctaaacttggtagaaatgtaatctcatgatttagcaagggagtgggagagcaagggagagagggcaagatctctggtgctgtgtatgcagcgctccggctgttaggccttcagcgttgactctcttggtttctgtgatgatccccagttgtgtgttcctagccttagcctttaatgagcttgagtagccaaccacttaactgtctctacttcagtggacactgggcatgtggaactttgcatttcccagaccaaacccaatcttctcatcctttactttcttatttctctaaatggtgccaggtgctgggggaactcctcatgttcttgcctcctgtttcccattcttcagacctagttaatcagctgagctgtttttgtgttcaacatttagccattcttgttctgatcgcttctgtcatgcgtgtgtgtgtgtgtgtgtgtgtgtgtgtgtgtgtgtgttcatgtgcacacatgcggagcacatatgtggtcgaggggacttgtagaagtcacttctctccttccgctgtctgggttccaggggttgaactcaggtggtcaggcagggtaacaagtgtcattagccactgagcgccttctcatcatgaaccagcacaggtcttaaaatttccttacatgctgctttatcagaacattgttttaacttcagtatcaatggctaacagctaggcattttctgttattattgttacaaatctcttttgagacattttgactattcgatagcgtatgctgatttgtttattttctagcttatttacttcaagacaatggaggatttttatctttggttggctgctgtttgtgcatagcctagaataccatttagttaataataggtactcagcaaataacattaaataaataggtatttcatttcttctcccttgaatcacttgtagcatttgtgctgccagtctacaatgggtgagcccttaatctttccatacactttggaaaggtgtccatatattttggtactgtcttcctataacttgatttctttatatataaatttgcagtagttctaggccttgagatctcatttgaaagatgttttcctcataagtactaaggattatgatgataatataatttttataactcaatctaattttaatagaatagtgtggaccctattagctaagcacgtggtaataaacttctattatagcaccctaggatataatattataatataataatttcttattactgtggttccactataaggatctcagttatatgcacactgagctttcatagtttaagaataaatatccagaataagaatttgccattgagaaacttgtctaaaatgtaaaatgctattatctaaggggatttttcacaaaatatatctgtatatttaaattgtaccgttttgttttaataagtcattcttaatccacattacatgttttcacctgaaattccagattaagtgcctttagctcttgtctcaccttctgtttgatttaatgcaattgccaaagagaagaacggttaaaattagctttgcagagaatggtctagtgtattaaataattaaggaagacatgagagtgactgaaacttggatcctgtagtcatttgtaggaaggcttgaattttaactttatatttgtatgttaatgtgctgtgtaacagtgagggttataatattgctaatctttcttctgtaatgtaaaatgaataaccaggacagtgaataagaccacaaaaagcaaataagtataataaaatgagcaataatgcttgctgtaggtattactactgttaatgctttttaacattgtgcattccttggttaagtgatgctggaaagattatcaggtaaagagagtcagagcttcaaatagagcaataaaatgcaaacatatcacttctgctttgctaaatggtgcaggcacaactggcagttatcatgtagaagaatgcgaattgatccattcttatctccttgtacaaagcccaagtctaagtggatcaaagacctccacataagaccagagacactgaaattaatagaggagaaaataggggaaagcctggaagatatgggcacaggggaaaattcctaaacagaacagcaatggcttgtgctgtaagatcaagaattgacaaatagacctcataaaattgcaaagcttctgtagggcaaaagacactgtcaataagacaaaaaggccaccaacagattgggaaaggatttttaccaatcctaaatctgataggggactaatatccaatatatacaaagagctcaagaagctggactccagaaatttaaataaccccattaaaaatgggactcagagctaaacaaagaattcttacctgaggaataccgaatggctgagaagcacctgaaaaaatgttcaacatccttaatcatcagggaaatgcaaatcaaaacaaccttgagattctacctcacacctgtcagaatggctaagatcaaaaactccggtgacagcagatgctggtgaggatgtggagaaagaggaacactcctccactgctggtgggattgcaagcttgtacaaccactctggaaatcagtctggcggttcctcagaaaattggacatagtactactggaggatcccgcaatacctctcctgggcatatacccagaagaagttccaactggtaataagaacacatgctccactatgttcatagcagccttatttataatagccagaagctggaaagagcccagatgtccctcaacagaagaatggatacagaaaatgtggtacatttacacaatggagtactactcagctattaaaaacaatggatttatgaaattcttggacaaatggatgtatctggaggatattatccttagtgaggtaacccaatcacaaaagaagtcattagatatgcactcactgataagtggatattaacccagaaacatagaacacccaagatacaatttgcaaaacacaagaaaatcaagaagagggaagaccaatgggtgaatacttcattcctccttagaatagggaacaaaatacccataaaaggagttacagagacaaagtttggagctaagacaaaaggatggaccatccagagactaccctaaccggggatctatcccataatcagccgccaaacccagacactattgcatatgccagaaagattttgctgaagggaccctgttatagctgtctcgtttgaggttatgccagtgcctggcaagtacagaagtggatgctcacagtcaactatagaatggaacacagggcccccaatggagaagctagagaaagcacccaaggagctgaaggggtctgcaaccctataggtggaacaacaatatgaactaatcagcaaccccagagctcatatctctagctgcatatgtagcagaagatggcctagtctgccatcattgggaagagaggccccttggtcttgcaaactttatatgcctaagtacaggggaatgccagggccaagaagtgggagtgggtgggtaggggagcagggtggaggggagggtatagggaacttttgggatagcatttgaaatgtatataaagaaaatatctaataaaaataaattaaaaaaaaagaatttaataatgattgtgtttaaaggcagctccagttctctattcaaccaatgtagcaagttcagaatagatagattcccttgggggcgcatacctgattatcacttatctaaagctacagaattggttcttttgtagcactttgtctgttccagactcactggatcatgtgttcatttgtgactccatattcttctttctgtgtatgcttccagcagtagaagtgagaggaagagaaggtactctcaaatgctctagttttattttgaaaagcaacaacacattcctagagtctgaaccttcagtgagattaccagatcttgtgcgctgtgtacttctcagctttgctgccttttcacattttcatggctccccagagatgctagaggccagtgcttccacagtcactgcagggtttgtgttggtttgttttgtttttgttttgttcaaaaaccaacaaaaaaaccaaatcccaagactacctgcaggctgcagcttcagtgggtccaggtggggctgagagcttgcttttctaacaagttctgaggaggctctggtttggtcagcaagtcacatctgccaactgcagctgtatgtaatttgagtcttcccagagtgcttggcccagagttaggcacatagtatgctctcaataagtgttagttggttcactgcacctaatgacactggaatgaaatataaaggcaagataaagtatattaaggttctccttaggggcactgcctgactctcattaagactgtcctgatttcttttctgtcctggagatgagggctcagtgctaattttcgtggctcctgtggtccctgaagtactatcactgccgtgtaagcccaggctctctttaccctttctttcttgactcatttcaggcaatttactaatagcgtccaacagagcccgtaggactaataagtgaatgagaatccctgtactttgcaaagaatttggtaaataaaatttaactttgactgtagctgcttccactaagctaacatttgactgagttcctggagagaagatataaaaagaaaagaggagaaaagaaataaattacgcttgtagagaaaaagatggttggaattgctaaattcattgtttatttctctcacgattttctgagtgtaagcatgtgaatatttcctcaccagaaaagaatttttaaggattgtttgccatatcatttatattcctcctattaaagcattttagagagaaagagtattttccatcattaaaacaggaaacgacaacaacaaaaccaaaacaaaacacagaatagccccaaaccagcctttataagttttgtaagctttgactgttgcagacccttcactacaccacaagaagaaaaatactgtacacaggttttaaatgtcttttccattgactttctgaatgtaattttcactctgcccacagccaacatatgaattcagttttcagagtactgttttccttcgagtccctaggacattaagaggatgttttgtggatgaaaaggacttcagcggaaataaaacttagtaaaacaagtttaaacaaagttaagcaggtgtctttaatttgggactccagagtgtttgatggttgttatgcactgtgggtaaggagagaggtaggtatactttcagaccttatataaccatgaatacctctggtgccgacactgagccgagcagactttgggaagtacagtgtacatcaaaccattcattcccgagtcaagaggactcaggggtagaaagcggagctcctcatgccggtaggaggtccaaagttttgttttaattttgggtggaagagaagtagtgggaatctttggaaagatgtaaggtggtaaagagtttctaccacatggttctcttactagtgagagagacctcagggcctttctggaatgttgagttctgtctagagttttattgagatagtgactttttcattctctagtgcctttatttgcacaaagtttcattgtctaattcatccagtctgatagtattgccagatgtactagaatgaaatgttgcagggaaattttatatatgaccccttatttctgtcaaatttcaaaattatggaaaattcaagtatcaatttaaggtcgaaccatttacatcctaaacaagcttgtgaatctctgccaagatgcacgaggtgttctttgccaattcatattctttccaggctcattgtctgcacccctccctatccctccccaaggcagtattctagttagcaatactctgcctgtaatgttgcttttcctgcttactaggaaatgtcagggaggtgtagtttgaactgtggaggctattaatctctatgacagtgtcaaaggaaagagtacagttttatagctgcaggttattaacactcctgacaacagaaagttgacatttttttcttttctttgcatttatgctcttgcatcttgaagaaaacttgcagtgaagagaacatgcattttacctgttttagtattgcattcacaaaatggatgggaacccgagagtagggttttttcaggtttgcagtatagttgaacttttaatctctgaatggttattaaggatagtaattattcactgcctcagtctacctcttgtccctcacataagtactatcagcatctggaaacaagtcaacctcatttgacagcagtatcatacttgttaagatgcactgagctgtgaccaggcatccataagcatctaaggtggaatttgagaatgcaggcttcctgttttcttacggagtaatccaaacttttaacttgatatagtaaagaggactgtcattttctgtttcagccaatctggttcgtattcactgactgtaattatgagtggaggtgtgtgaattagttggcttaaaaactccaaatcatgcacacttataaatgtgtcgcatgcaaatgtttctagtctagaatacctaatttaaatgaatgacaggaggcacaaacatcattggaattgtgaggaaaacagaaattagatgttacagccttgttttttgttctgcatgctgtcttcatgtgtgagaagccaagaaaactacaaactgtgtagagaattgagtgggatcgtgggtgtaacctcttagcttgaagcattggcaagaaagaaatcatttgttttctgtgtgttattacgtaaccgtgaacacactattttgtttgttttttaagcctttacttttcccttggttaaaaaacgaaacggaccttcagtcttccaaacactgatgatgctgcactctgtgtgtgcttctgtgcctctctctcacctgcaaactgcatctctgcattgcaatggggacagaagtctagattgagagccagggcagtttgacttacagttaatattttatgtctttagaaggttacctgtgttcagatgtgctggagtttgtcatcattttaccctgtgttctaatatcaataggctttaactagtccagattccttgtttgtatctaataattttatcatcaatgtagatggaaaaaatgctaaagacatagcttgtggaaacatgaaccataagctctgattttttccttgtccgaatcctctgtaagatgcctttatttggtgcctctgctctttctccctttgcctctcagctgtgtttctccctgtacttctgtttctctgacttactcttttttctttaaacatttcttataatttgatatttgtatctctcattttctgcactacccgatgtttcctgtacataatatgcgtatcagttcctagagtttgaaatagaaaagggtatagagagactgttaaaatgtcttaccatctttctctaggcaatcacttttaaaacaggatataactcacagaagccaatgctaaatgtgataaaacttataaattgtatcattacactaaagggggtgctagcacatgaccagtatggagaactagtaaatatcttcgtagatttcccttgtgtttcctttctcagggctgtcagtaatagttgctggtcacacatagcacctgtgacccatcaagtcttcaaaggactagcagaggcaggcagtacttgactggctttatctggatttgtggctcagctggactgctacagctttcttgctccctctgggttttcttgatgaactggcctcctgcaaggggagggaacctaaaggcaatgggaggaattaatgagccactgagaatgtggctctctcagaacagaatgttgcttgtgtcccgaactctttgtccctaaagttttcagagaaacccagtgtaaagacttttaaaacatcatgcttatgttgatctgttttgaatggcaaaagaaaatggaacatttaaaagtcattaaaccacatggcttgagcattctgttgagcctgggttttagaaacctctgggacttgcatgagatgcttgttgctactaaaagacagaaattggggcaagtagaagacatttatcataatgttgccttccttgagctgggtttgttttaatttggtacttctagaccgttataaactactgttggggaggaaggctatttttcactggttcacagttaaacgtaactaggtaggtaggtaggtaggtaggttggtaggtagatagacagtcagacagacagacagaagtaggtaggtagatggagagatagataagtagggaggtagataggtagataggtagatacctagtatactatactcttcctttaacaccggtttgaacagtttgttttctatagagcttgtttcagctctcagtgggtctttcttcttcattactgcatcgctgctcttaccatctggatcttatgtgcatctgttttgtgttcactccagcactttctaccccagtagctagcagcctaccctgtggagccatgcccattctcacagtagttcatggacactacacactagtcttccttgccatgtctcttctgtcttacttttcactcactgcatcaatgagcctgtctatcattgcctgcctctttgcttttatctttattgttctgcataaagctactatttaggttgaaggaaagatcagcaaaaaaccaagttctgagagaaatccacctgtttttaagacgtgtgctatttttatcagtctgatcaagatgcacgggagcatgactgaacagtcctatgactgagcattgcctccttaaaacatggcaacagaattcagtgtggaagaggatggattctgagctaaagagctatagtccttggttttttaaaaacgatagctctccttgaaaatcatttgccttttagaggcttattaaacaggacatttataaaccaaatatgcaatgatttgacatactttaaaaacatcttttctatatttcacatgaagtgctttctttacattttgaatattgtatagttgaactgtaagtatttatcttgggtttctacttcctgtaatttatgcaagacatttatttcttataggatctttagcttttagctttgcttctctttatgagctatctttaaaaaaagtaataacctaactaatgtatgtgaaaatgaacaagatgactctatttagcctatttagtggttattgaataaccatacatactaagtaaaaagggaaggtactatgttaatatggttcccgaacagattgtgttctttttataggttttattcatattattgtaatattttatttttattaatttattttagctttcttagtactattataatgtattatactaatattactactaggtttgcacttgctacatttaaaactaactaatgaatacttaattgtgtgacttattaccaaagatttattgaagtgcaggtgcagccaaccgagaactgatgaaaggtctgagcttcatatttcctttataagattcaccatatgatgcttctcagactggaaagattttttggttttgtgtgtgttgtatgtaatatgtaaatgtatgtatttgttaaaactataattaggcaaagtctgagaggagtttaacaagtagaagacatttttacacagagtagaaaatttagtttatgtgctttagtttttattattgtggttcagttttgtttgatctagtcagctaagattgtaattgtgtgttcttactaagctctaggtggtttgagttcagaatcaccagagtggaacatctcacttatgtttctttacatggtcattggtaggactttaggtagcagcctttggaatatcagatggatttttccctgttgagaactaactagtacagtgcagtatgttaaagtaaaaaactagcttcatatagggaaaaatagaattctattctgtagtagttttcgtcaggtgggcacttatggattttggtgaatgtctctagtagtaaccatgtaaagcttgtacagtaaactctgttgatattttgtttgatcctagcgtggctcccaagtagctggtcctcatgttatagtggaacttacagtagggaactgtaacatgggaagatgaaggcagtggctttggattctagaactagtgtgctgtgtgtagagagcacatgatttcaatatctgcgggtttccatagtgtctgtagctgctctgtaccagtatttcagaatttgtcagatacctaaatgtgaaatttcatgtgatgttatttaatttggtgttttcattagaacctttaaaaaggtttctgatttattctttatttttgcttctctctctttctctctccctctccctctccctctcctctctctctctctagaaaatcaagattataacaaaattttattctcagggcaaggacaccttaagaaaaccaatatatcaatagctttaaattacaaatcataaacattgtaattgtgtgatgttttcttcgttccttccccccagacactttgatagcaaaatgtcgcataacattcttttgttgcttgggtaaactgttaattagtttttcttcaatagaccatcttttcagttaagtaaatgaagtgacctgatattttttacattttctagtgcaaaatcctacttcgtactgttctcggtcctttctgtgacctgagaagcagagctaagggaatgaatgcactcatgcatccagctccatcccaaccgtgtcgattacgagaaatagctcactatcattttcccttttaagactcccaggtatcaacaaatcgtgtctttgttgtataaaacacggattttaatgaaccaaaccaatctctgaacatttgtagacatttgattcttctcctgtagctcatcttgattatatgtttaacagttatggttataggttttattaatattattacaaatactatatttaaatgatttttaaaaataaatataaatatcctggtgtggtatgacacattgcctataatctaggcactagggagtctaaagcagtagaaacaagacttcagggtcagctcaggctacatagcaagttacaggctagctatggagacatcatgaaactcagtctaaaaaaactagggttagaaagtgaagatgtgcagaaagaaagaaaagaaagtccattttgatattaccaaatattaccacaacgaattttgttatatacttgctagtatctttcgatagcaacaagtttccaagtttttcaagttgtgaggagtgaattaatctacataagtcagttaatctagagtctgacataaggaaatacacagtaagtactcttgattctgtgtgaaagcttgtacatatttgtatagctgtcatatcatacaacagatatctttgattctgtcctacctctccctcaataaagctttgattttcatgtctttttttttaattaggtattttcttttttttatatatactttttattaggtattttcctcatttacatttccactgctatcccaaaagtcccccataccctcccacccactccccctttttggccctggcattcccctgtactggggcatataaagtttgcctgaccaatgggcctctctttccagtgatggccgactaggccatcttttgatacatatgcagctagagtcaagagctccggggaactggttagttcataatgttgcacctacagggttgcagatccctttagctcctgattttcatctctccatccttacctgccatcctgtgattgcttactctcctgtcactaggaagagtgtgcttggtacccagggcagtgcttcctggactcagagggatgtttaaaaatgcatagatgttttttttgaagaaggctctcgctgtgtaacttaggtctacctctaacttttactcgtactgcatcagcctccccaaaaacttcaattataagtttatttactatcatgttgactctagattttgacagtgaaagacttttaaaactagctattcatttacttcacatattttaaaaagaagtagatgataaatgtacgtttagattatcttttagcccttgggggctcccagagaatgaaccaccaaccaaagagcaagcatggtttggacctaggcctcctgacccccacacttatgtagcaggtgtgcagcttgtcttcatgcagatcctccaacaactgcagtggggactgtccctgacactgttgctgcctgtggatcctactcccctaactgggacaccttgtctggccatagtggaagaggatatgcttagtcctgcggtgacttgatgtcccagggggacctcccattctcagagaaggggagaggctctgtgagaggagggaataggactgggggagggctgcaatcaggaagtaaagtgaataaataaataaataaataaataaataaaagattctctcttaggggctgaagagatggctcagatgttaagaacaccgattgttcttccataggacttgggttcaaatcccagcactcacatggcagctcacaactgtctgtaacttcaagatcttacatcctcacacagaaatactcacaggcaaaatactaatgtatataaaatgaaaaataaaattagagaaaagattctttagaagttgtgttttaaataatttcaggatatgataacatgtaattttagtacttcaaagatggaggcaggagaatctgtagttgaagattattctcagctgcacagtgagtttgaggccagcctaggctgtttgagatcctgtatcagaacagacactcatgtcctagttgatcgtgttcataggggaaactctgtgaaactctgtggcagacctctagtctgtgtactgttctatggaaccatcaagtgacccacagagagcaaatgaaggatagggcactagggtgaaactgttgaaatactttgctagcatagtttgtaatatatgtctgcgaactattgttgattataaatttgattacattatgaatgttaccataatggtcataatatatagcccatgtgttatatatttgtgccaatttctgttggacagaaaacagaaaaaaatgaaaagacattctcatatttcataattttaactccttttctattttactattcagtatgaattacaactgaagagcattcacacaaaattattaataggttttccatttgtagaatgtctttaaaattgatgcccattaattttgtattatggtatcattataatcatattttacacacctggatttctttttcaaagtttctgaattgaaataacagaggaaaataggatgtgttggtttggtgagagacagtgctaaagacacagttttaatattagcagacaacccaagctaagagagtgcattgaatttgtttttattttgtcgtccatgtgctctcatatatcatgagtctatgagtggataagtagaattcacgtgctcgatttgaatactttttatatcggtcctaaacctgtggaatgaaatctgaagaagaaaacagttttattttgctgcccaaagtttgcatatgtagaagatacagcagaagtagtagactgagtacaatgctggagcagtctccatgctgagcagtccccgtgctgagagctcttgtgtgcagccttcctggtttgcttccttcccctctctccatctgcactgtcccctatctggcccttgctgaaggttcctcttcagtccctactgctgtattatttaaaccccatctacagcacatgctacagcagtgctcaaatctgcttttctatcagaaaacaaagctttaaaagcagccaggggagccacacagatgagtagagattttgtgacaatggcctaaatccaggaaatgcatttagagtttttgttttaggtagaattaattgacttcagcatgtttgtccattgaaaatggagaatatttttttcttttccagagactcaggatttctattctatgtattggtgtgtgtttatcatgtacttatatcccatcatttattaaagactttagtgtgcatttaggaccctacaaataatttattcccatgtacattataccacttatgtattccctggtacttatagggttattccatagatgaaatattttcatgcaaaatgaataattacatattttgatagcacagctgggaatatataacagatagcatgttctatagtttgtaatccatcagttggtaatttttttttacccacctttcccacattgacagataaagagaaggaactctaagattcagttaaaagtagatgtcctacttgatacacagtaatgtaaaaggtagagagaaatgggtatgtgttattgaatctttaaggaaacgaggcattaaggaggcttttgaactttataccaagagaactgagatgagaaagagcaaaagtgaaatgtgtacagagaatgctgatgcatttcttggttagaagcctcactaaacattttagagcttgcaaggcagatgggattaattttcattagcacagcagaccgctaatcttagggggtaaagaggatgctaagtgcaagtgctagaaacaaaccattttgaactacagttgcattctaatcaggctgagtggataaacattagaagtaactcgtgaatgtaaagcaaaacagaaatgataaaagcagggaagctttatgtagtggaagacaaaggctttaaagaggaacctgaggccttaagcccagttcttatctacctgtgtctgagggtcagtgagaactagtgagccaaggagtctagtcacctgctgggattaaaggcttgcgcatgccaccactgcctgttttctccttctttatcctacctccatctttgcattctcttaaaagaagtaagaggtaaaacactatgaaaatactttcccagctaagggggaatgtgttgtctgaaggaaaaaatatgtgaaatttgagtgtttaaatcttcttttctggagccattggagattttggtatatttcagttgggtttgatgtttaaatgtgattgatgtaaaagagtatactctttatttatagataaaatatcttgctgcagacggacctcacttgggtccttgggttcccattacaggtgggcaaggagttggcacagatgacaaatacaaacacaagagagtatggtatctgaatgtatttttgtcaaagagagcatcagtcttttatattacaggaaacaaagaaattaagtgatatattaaggccattcaaggtacattgaatttatctgatgcaaaattacttttacaacaaaacagaggaatgcgtacttaaaacctaactggaaccaactgggataaaatcaatgttaacaactgggatcaaaagcagccccacctaaggtcagcttaatcttacaagccaggggcaggggtttcatgcccttgccatagttccaattctagtctattgtatagtccaccttccccctaggccattgtaaattcctgtgtctgggtgtaactcgctatctatccttctaagtatttactctagttcctccctagaccacaaccttccttcttcctagataattgtaaattcttgtgtatgggagtagctcagctattattctaagtgatagtgtggggggactttctactaataagaaatgtagtctgccatacataactataataagaattctaaacttactttgctaagcttgccctgagatttctaacactatgtagtagatagcaaagcctgatttctttcactggctctcttacaatactagaggcaattctgaatgtcactgaataggcaacattcttactgaattcaaagcccatggtgggctcaagaactacctagggtattggtgaaagccaggaagcaaagttcaattttgcttaggtatttggcaagtcgttgcttggagacacctataataaaacaatactgagagaaagcacacagatccgctcaccaactaaagcaaggacattggagcattcgttatacaggatgccacggttccaggagactaagtttccatgaacttttcacctctgtccaggtttctaggcctgtcgcactggtcactactggagtggatgtagcaatagctgactagtttggcctgagctcagccatgagataatattttagtgcttttctatctacaaattgtcttcctataggcataatatatttagctgtgcctgccaatggtatatcttcttgattaaaaaaaaaaagatatatttaaaagagttccaccataccttttacacctgttagctttagcagctttccttgaatgtgttgtattaaagtatgaagtataatggttttcactaaccactcacacactttgggagtggaattgttctctttcctttggatgtgagacaaactgtagaaaaggttaaagctctgtccacgctctgtgcttcgaccagaactgttgctcagacacaggtgttcctagtcacattccagcactttctccatcctctcccttggctctgtcccttggtgatgctgtttcagtgggtcagctaacatgtgtattctgatccttaatccctgacttttccacttgatgtgaatgaaattgaatgttttgttttgaaatggagagagaatgcttcagtgcatctatctttacagtgtacctaataacttggtcagcctcacaggaatgatgggatgttttttggacattttggtgagctggaaagcaaacttttgggagaatttactaagcaagttaaaaaaaaaaaagggcaatgtgtttttttgttttttattttcataatgaagtatttctcttgtctcatagtccttcttaaggaaaagcctgctggaagcagaaattaggaaagatgatgaaacacagaccgtgttatgtctcccatatagaggaagattttaaacctctagagttcaaagaaaagagctgtgcagctgcagtgagctcgtggctgcacactgtccgagtgccctggaggcagaagatggacagtacagggagcaggcttaccctccagctccttagagaagagtgctttcacttctggagtctttgtagcaacttttcttgactctctgaaatctctaacttaagttcccatcttttgacagtgagatgagaacataaaatgtaaattcctaaagtttatcagatttcaaccttgagatgctggtctgtcacagcttagatacttaaaagtgctgtgttggcccattgttttctttctctgattcctttaatacaaaagtttctgaaatgctgatctttgaaattaggaggccagacctcagaaaagaaaagagaacaaaaaggaagtgaagaagttcctagctggtgctgcaaaccagcttccgagtgcaaaagagcacagaacatttgaaggcaaagctcagtttgtctcacattgccacaaaaccatttgtccttggaaagaccacagaatttgactttgctcagctgcctgagataacatggaatatgctttgcattttaatttaccccatagatactaagtaagcatcattcaaacacctgctactgtagggcagatgtgggtgctgcttttctcgcacaaaaagccatttgtacttcctaaggactaaggtagctacaggccagatcctaccattgtaatatgactgactatagaaaacgctgctttggttataggacatactttctgtggtgtagtgtcctagtgttcctggtgttcttcctattacagcctcacactactgtattttacctctgctgcatgttagcaattcagggtcatccttctctgatgcgcttttgaggaggagtgcttagaaatacgcatgctacatgtaaagaggtagaagtgcttagaaatacgcatgctacatgtaaagaggtagaagcctgttaaatatttgcttcttatttgaaatctgtgaaggaagtgcttagaaatcattccatgagaaatactgatttgaaatggttaatcagctactataatacttgtgattttcctattaaaacataagcatagagacattaaaagtaattattgaagctgtagtattttaattatccgtttttacttcaaacacatttccctgttagacatcctgtgcatcattttctttttaagagtaatttggaattacaaattttacatgaaagcatcatgtaaataaggtttattacttcatttgatactaagtaagacataattagaaaatgctttcatattttaagtttgaatattggactgttttgagatgtcataccagtatggcaattatctttaaataaaaagaaaacttttctagtttatcagtatacatgggagagtattgtatacttaagaattcagtgtatctccacacatgcctataatataagtactcgtgaagcagggacagtggtaggagtaactctctgggttcaggctagccttgtctacattgcctacatagtgagttctaagccaaccaaggtgacacagtgagaccctgtttaaaacaaaagaaaacataacaatgttacactgatatattggtggttgtcacttttgtatatacatgaactttagtattctaaaaacactgatgctcaggtggcttgctggccagctaagtcatagtctctgaatgtggagcttcaacatttggcatttggggttgttgtgttgttttgttttgtgttgtattgttttgttttaccttaggtagaaagaggaagaaaagatgtgttcttttgcactctacatgaatattgtaatgtagagctgtgttcattggagttgtagtcactcagttgtattacaacaaatgctaaacactcatacatttgttcagaaaaataccttgtgtggctgctgtgtatggcaggcctgactgccagctccttctggagaagactccatcaggatatcatcctagagtttatattttagttctggtcaaagatatttcagttttccttaaatctgtgtgtaccgctagcagaatcatctcattttctgtggcagacttaaggtaatttgtgggtacagctgaggttctggtcagctcacagggcctcacctttgttttctttaagacttttgggtcttgtttcttctcaaccacattctttatttgaatcaaatcactgtttaccaaggtcagtcccaccatcctcacctcataatgagtatgatggattatgttttgtttgcatgtagcagagaaagggtcttgctcagtagtcagcagcgtttacagcctgtgcagatctgagtttggttcccattgcccacatccagtggcttataccacctaaagctccggctccaggcatctgatcccctgtttcaaccttctgagaacatgtgcacgcacttaacgtatgtgcacacacaagcaaataaaataaataaaaatatcaagaaacagttgattgagtttgtataactttagtttccagagttaaagccagataggataccttttaaaaagtgagtattcaaaagtattgtttagatatgaaagatttggaatgatatgatggcttagcaggtaaaggcatttgccatcaagcctgatatccctagttccattcctggaacccacatagtagaaggaaagagccaactccttcaagttgttctctgacctctgtatgtgcaccatagtgtgtgagcactttcaacacaaaataagtaaagatgtaatttgaaagaaataattaaatatttgaaattattctggtattttgaactgttctgctttaaatgtagtctagttatcacagtctcttcggtacctttataacagtctctatctatgttcaataactacaaaaatcttgatatatagagcatgaacatcagggatgaaattcacattcaattaggccagagcctctttactgacctaaataacagttcattcatgagataatgtgacttacagccagagagagaaatctattgcctgagctggggaagcctggcatagcacaaactcttcagtggtcagaaaatcatctaaaattagaccaggcaggaaaaatagtgcagagatttacaggtctgatttctatttcaagaatcgttctttctcaagctgtgtgtataattagttgtctagattagacctggtaatcctgcagtgcatgcctttattagtacaaaacccttatcaaagggattttgtgattaaacaatttttatattttaaacttattttgtttgttttttataacttgggaagttcacattttgtcaaagaatttcttctttggacagttggtcagtgtatcttgggaacttgagatagctgcaagtttggcaaaagttgtcattaccagagtgacaatccctgatttagaaatgaatgtagtgtattgtgtatgtaagtgttggcatttgtttcataaggtttctattgctgtgatagagcaccatgataaaaaaaaacaacttaggcaaaaatggtttattttagcttataggtccacgccacaatccatcaagaaaggaaattggggcaggaaaacaaggcaggaacctggaggcaagaaattgaaacagaagtcatgacagtacgttgcttattggcttgcccttcagggtttactgaacctactttcttatagcacaatggttctcaacctgtgggtcataatcccttagtctaacgtctgtctccaaaaacagttacattatgattcatgaaaccagcaaaattagttatgaagtagcaacaaaaataattgtatggttgggtgtcaccacaatatgagcaactgtgtacagttttattaaagtgttgcagcattaggaaggttgtaaagcattgtcatagtagaatcattctcccaggggtagcactgtccagtgagctggtactccaacatcagttaacaagaaaatggtccatggcttgcccatgttctgatatggaattgtctcaattgaggattcctcttccaaaaagactcttgtatcaagtgacagaaaaactagtcattgatcatttacttgctgtttgaaaatatgagattatcttgcccctttcagatttcttcccataaatctgccattaacttcttaaatctgttagaggaaactccttaaaccagaaagacataaactagtaagattctttaaaaaaaaaccgaaaaacaaacaaacaaacaaaaaaccagatgggtcagaacaaattcataaaacaagtcattttaatatccagtgaataatttgttggctaaaggtttctgatcattttaattagtggtttttgatttattaatgtcaaaattagaaaagaataagatatggttttacttttagagctagcaggggaaaacttaaaaagtaaaatgaagttcagatttcattcattcaacaagtgcttattgactattaaggtgaaaagcagacagtttcttccagctctatgaattatacaatctggtaggagaaatagaaaattggtaatacaacaactatgctcaaagatgcgtgggctggtggagatagagcagggcaagggaattggtgagggagtggttaaagatgatgtcagtgtgggcttaatgtagaaggagatacatgaaaactaacaaggacataacaggtataccatatggtaatgtcggggcactccaggtaaaagttacatccagtgacaaggatctgggaaacaggattgttggaacagaagcccgagaacctctttggcagttgtggggtaaaatgagctgatggggagaggatagggcagttttgcacttgcaaaaatgtgattttatcagtgcagggaaagctttgaaagtgattgagcaggagagtaaatgacctggtcctacatatgtcttgatatttatcagagttttttttttttttttaccttcaattctgtcttttctggagtgaaacactaattcccatgcctgaaagatgagtgagaattacacattaacctggaagtacatgcagaacctatggctctggctccctcctcctctccttctctttctccctctcattcccccacctgtctgtctgtctgtgtgtgtgtgtgtgtgtgtgtgtctgtctgtctgtctgtctgtctgtctgtctgtctgtgtgtggatcagtaggtatggaaggggaggcagagtcaactgctactttagtcagctttatgtaagacataattatgaccaaattataacatttttctgtgttaccggaagtggggatttggggtggggtgattgctacacatgtgtctacatgtgctcatgttaaattgtttccttctctattgataccactggtatggctattgttgggttgaataaaacagtcagaatagcaatttttttgctctgcagtaactgtcgtatggtatgatagatactcctgcttaatggtagaaattatgtagaggggttgaatttgtgactttcagttccttctcaatttcttctaacatcatgttatttctcatttaatgtcacttcaacctttttatggctattgatatcacctcatgactttgctgttgcattttgaaaggagggtgtaaaatctctaatagcaatatatgaggtgaagtaatttccaaagagggagccattataacttagaaaactatgtaagtgcatgtgtagaacacaggtttaaccatgagcttcttagattcttcgtattgcatgaaaacaaacaaacattcttgtatgcagtacaagcattttgaagtgtgtaagaagtaaatccccgattttttgtgggggtcttccttactgaatctgataaggaaagataattgcagctgtgcggcatatcagtggcatacctgctgttatccttagctgtcttcctattttccaaagaaaattgaaatgtctggcagtacatcaatggcacatactctacttttaaataagtttccatatgtaatgagaggagagtacagctttacaaaaaacccacaaaaacaaacaatttatcatagctcttttgatagttccatttagtacccactgttttcaagccaataaactccctgttctgaataattgtaacagaaatagaacatgcttgcttccctagtgtccttcagtaggtgggcagagagaaaactgggcagaatcagatcagccatgagtttaaatctcctttcttgtttattgattctgtgtccttgaacaagttgtttaacttcctaaatcccagcttcccatctagtaatagagactagtaataggtattcatttttcaataatttgagaattaaaataggaaccacctgatcctagtaggtacttagtaaatatgtcctttacagtcactaccaaggatcacacaatggggagtaaagtgggagaagaatgaaaatagataactgttgtagaaattctttatcccaatgtggggtttctaccctgccttgatcattcagttcccaaataaaagatacacaacctttattatttacaataagccttaagcagctgggcagatgtctaccctctatgctatatctactttcctatagataaccccgagttattactttctatgtttatgtttcatctgggctctcttaactccaaaattggccagacctcagagccacattttcatgaactcatctaacccatggtgacacctccattcactttctccccctaatggctctctctcaacacccctccccaggcccaggaaccctaaaaccctcctatgtctcttctgcccagttattggctgttgacatctttatttaccaatcagaaataatttggatcaaggtcacatagcatcacttgggtctatatgaagaatctctcctctcttgggcaaccaggtctagggggcctgcatttatcattacaatacagaacaaaagaccaaacctcaataattctcctttttagtccaataaaaggcttcttttctctcagttttaagttgaattataacaattatgaaaattataaggtatgatatacatttataacatccagcctgttatatttggcaatttatttaaagtattatctatactagtttaatgagtttacaattctgtgtctaagtcatctttgattttaacttgtgttatcattctaaaacctacaataccttctttaatactaaacaacttaagtttaatttgagaatataactatctagtctttaatgccatcagagatttgagaaagaataaatattgtttgagaatgcaggaagcacagggacatagcttccaaaaatcatagaaatgacagagatagctgactacctggacaacccctatatttcttataatgttagagcatctatcttcagcctttcttccccaaacatctgacagaccttaagtgaagcaggaattatgaaggactagcttatcctgtcttggcattgcttagccatctactgtcctgtgttcctttatctctttgaatctctggtatgcaaagaattttcgaggcagcactgtgtgagtatataaaggtagatgccacacccactccgtagcaggtagggaaaacagcgagtgcaaaagtcctgaaattaggagtctgattcacctgaggagccagatgaggcttgcatagctggaattcagaggtagtagtcagcactaggctgtagtaggaagtgaacatagtccttctaggtctctggaggattataagaggtgaaaagtcaacaaataattctaagtagaggagctagcattttaaaaaagagatgagctcatttgaggtggcttttgaaatatgtaaatggtattgaagtaggcacccctttccccatgagggaaagatccctatgagagctctgaactgaagatgtatggttatgatttacctgtttttagtttggttggaaatcttaatttaacaatattcaataagcctgtgaggtgtaaaatgagagaagacccagtacctggtaccctggccaccagaaagaggcagatgatcttgtaactgaggctgagaaaagtgcactggcatagatgaactcaccagaattttaagtgaaggaagacagcagttaatattagggtgaggggtcaagtaagagggaagctttaaaagttcttgaattgctcaacatgaagatatttgatacatgcagaaataattcagtagggtagtatggtttcaggcatctatgaaataggaggtgaaatagttaagtcaggttttagtttttttgtttgtttttgagaaatttggctgtttaaatgaagaaaagagagtagtatcaagtgggcagatgtaacagtgaatctgttcattttcatgtttatgttttgttttagtttaatgtattaattttaatttgctttaatttaaatcagtatacatgtataagctacttgaatgctcatgtttttgaacattcaaattcaagagtttccttgaattctccctaacctgtatggtaagatatagagaatatctgatattcaaatagagggtaatgaggctgtattggactaggcatccagccatagttacatcaaatttattgttcataattgatttgttattacatttaaatgtgatgaaactgtttaaagaaggaacatttcctttccgagatcaatcatttaggaggaggtagagctaagattcatacccagaggagtcaggctccacatttcattgcaggtcttctcacacaaatagtagcaaaggttaagtaatgaaacagctctctcaggagtttcagatcaaagactaggtcctgggcagaggtgctgcgccatcctatagtgccagcatacaggtgactgaggccggagggactggggcttgaggctgctttcttttctttctttcttttttttttctcttcatttttttttttttattagatattttctggcttttttttttccaattttttattaggtattttcttcatttacatttccaatgctatcccaaaagtcccccataccctccccacctactcctacttcttggccctggcattcccctgtactggggcatataaagtttgcaagaccaaggggtctctcttcccaatgatggccgactaggccatcttctgctacatatgcagctagaacaacgagctctgggggttctggttagttcatattgttgttccacctatagggttgcagaccccttcagctccttgggtactttctctagctcctccattgggggccctgtgttccatccatataactgactgtgagcatccactcctgtatttgtcaggcactggcatgaggctgctttctaatgcggctcatatgatatttctccaaatggacttggccttttaattagtccttttgaaaattgaattaaacttatttatgtcttatacaggtatactactaatataagttttaaatgatatattttaccaactatgtgaattaatcatgataaattaatgttaatacagttttgctttgttttgaatatcaaagcaacaatactttaagggttaacattttgaaatctctccagctggaacattagttctaatgcttgccaacagtgagacccactctgcttcacattctccctgtagagtaaataacaccttcatccttggagatatgatctcctattactgtgatattcttcccctctgaaagctttttggttttatcttgataaagttaattctctacctctccacctggtgttgtcttttcatcgatccttttctggaatgctgatagattgatttaccacagagcggtgacagtggcaaaaaggaactgaaataatataatcatctcaagcatagttatgcagcatggaccagtattaatagtttaatagcatttgaaatgtatactaattttaatgtgaatttagacttctaccgtggatcaggcattgtgccttaatacattatatgcagaatatttgatttcaggtgaaatggttttatattgtactcaaatatggttccctgattaatgattattattatgtcaaaatgaccttgaatgccagaggacttatcttaccactaaccacgggtataagtaaggtggtgtgatgttgtgtgaacttaatagtatacatctgtgttttatattttgtgaggacttaacttataacaccttgtttacattcattatcttgttcattaaaaaataaatatttccacagtgaaatcaaatgtaaaataatatttttgtaatgattagggatctcaaattttgagctttgcatacctgttttagagaaaaaaccgtctggtctggatttggaagggctgcaattttcaaaccactattaattcagagttgcccagccctctctgtgagctatggtatgtgtcagataacaagggagttatgatgtttgctaaatctgtttttgctcttttgatcaatctaacataaaaattgtaaagaatatactgaattcaaagtagctttgtatcctggaaagtttgagttgctcaatacaaagagttcaattattattacataagagaactaaaaataatttaaaagatagcccaaaggccaggaataactccttaagatagttttgttatttgtttctttttcttttcttttcttttcttttcttttcttttcttttcttttcttttcttttctttcctttcctttcctttcctttcctttcctttccttttcttttcttttcttttcttttcttttctttcattttatttatttttgccaaatgttaggagtaattggtgattttggcctttagcctagtccttcattcctgaaaagtgtcagtttattctaaagtttcatcactgaattgaatacttagatatatggtagtatctatgttagcatataagtagttttgaaacccagagtaatccttgagaaaaagcttccacagggaatgaaacatgtgaatgagaacttgagagtgacccgttaggtagattgagataggtcaggttctgcatggtcggggcaattgcctagtcctgtagtttcgattttagccatttaagttctaaatgcttttcttttgaggaccggttcataatctattagatacatacatttcagagtttttaaaccatattcagcctcatttcttctattaatttattttccctttctagtttttgtgtagttgcccttccttgtatcatcgaaagaaaatttacaggggaatatatgctatgggaaatgagtttccataaggtctatctcttgggttctacaaactttacctttgatgaccttatgctttacttagataagatgatggcaaaagggatagatttactactttccctgaggtaaatcttgaactataggtgttcatagattgtagatgggagtctcttcatgtctccctccctgttctcagtttactaattggcccattatggatttctaggcctagcgcagcatattctcaaccttcctcatgctgtaactctttagaacagttcctcctgctgtagtgactcccagctatatcatcatctttgttgttactttataactcgttttgctactgttatgaatctgtgttctctgacggtcttaggcagcctctgtgaaagggtcattcaacccccaaacggcacaaccctcaggttaagaacagatctaatatactggatctccatatcctccattcgctaaaatttgtttagactccaaacccttctcacaaactacccagctgtgggtagagaaatggcactataatattatatgtaccaagcttactagaagaatgaatgattatttctgataacaaatgtagattgttccatttcttaatttaaaaacaaaaagaaaaacaaaacaaggcatcgtttttagttatcttgtttatgatgtattcttgacgtattcaaggagtgtttcatgcctagcagttgcttacttggagggacgatgctcttgtgtatcagtttctctcatttgaataatgatgccatttccagctttaatggaaatgctaccaggaggaagcaaacaattgaactataatagattagtttcacattaaaacattcttttctcatctatttatatgtacagttgaggtatgttaacagtatattttcttcatacacgaatgtctttctagtctttaatagtttaaaagaatttttgtacatatgctcttgctcgctcaccctttccctcccttcctccccccatctctcagcatgtgcatctttgtctctgtgtgagcgtgtgcacgtgtgtgtgtacccaatgccaatgtttagattgaaatttatctgtcagctctataaaaaatgcagagaaaacacacatggcctacttttacacctgtgaggctgagcagttcctagtagagaaataataattcagccttcagtcttgggctagcctttgctattacccagcagcatcattgtgtaatgatcatagttccaacaatgcaacaccaatagcatttagtagtaaaacttattacttgggtatttgttggtcactacttgtattactcttagtgtactcacagcactaagaaaacatgagtctgccttaaatcatagaagtagcaaactacaatagattgctttcaagttttttggtgtttttctcctatttatgaaagcttgataagagtggaaacaactttgtttgtaatagccaacagttaagtgctgatgtagtaattcttactccgagtgattagtttaattcttaggagccttaatgtcttcatcagggatgagggaaggggaagagaaagactcctcataaaaattaagtgagtgtattaaacagtggcccaaatattggcaccctttattaactttgctttgtcttttctatatctgtttaaatatctattttcaagtcttttaacatcattaatacataccttcttagtgcctgtattaggcctctgctagctactgagtggatgatgattgaagaagtttgtggatggcacctgggtcagttggttgtggatactattttctccagaaatccagaagcatggattttgcagctttctcaggattactcaaaaatatattcaccaactacatgagaatctagaaatatgaacaaattactactgactgttaagttgatccaaagatggtagtagatgtgaaagttcttgtatgtgttactactaccttcaactctctccgacactcaatgtgtaagaatgtactttctgtatggttctgactcagacattgaaggtcctatttaacagagagaactgaatatctgagtactcaatttcaaacgtacacgataagctactcttctggacagtgggcagactttgtgcagggccaatctttactttggactgaaatcctaatatccatttaatgaaaagaaaattgtgtgaactgtgagttgatccatgcatgttgtcattagaattaagtttagctagttccatttttcaggggcatgctagagctatttcaacacacttctattttctctttgtaaattgacttggaaagataaaataggtatttggttgaatttctaaatgttggttcagtgtctattttatacaaattaaacttttagtgcatataccattattaaattgtaacatgttaacttgggagacagggcaacatcaaacttgtagtaagtttcttagtaaagaatgaaacattgataatttacctggtgctataaaatgcaatagtgattataaagcagggctgctgtcacatcagtagcacaaacctaagatgttttgaagacagtaacatttacagtgatttttctgttttattggcataaggtaggaaacaaatgaaagatcttgagggtcatacctaaatctcagtagagagtaccatttaaaaattcaaattaatttgatttaaattttgagttcacccctgtaccaataccatgaggtttttaaatcactattgcactgttgtatagctagaagtcaggatggtgattcccccagaagttcttttattgttatgaattattttcgctaaccttgttttttctttttttttcttttttgtttttccatataaaattgagaattgcgttttccatgtctttgaagaactgtgttggaatgttgatggggactgtgttgaatttgtagattgcttttgataggatggccatttttactatgttaatcctaccaatccatgagcatgggagatgtttccatcttctgaggtcttttttgatttcttttgtcagggatttgaagttcttattgtacagatcttttacttgcttggaaagagttacaccaagatattttatattatttgtggctattgtgaagggtgttgtttcctgaatttcttcctcagcctgctatatccagtcaccttgctgaagtcagttatagaagttctctggtagatttttggagttacttatgtatactatcataccatcctcaaatagtgtaccttgactactttgtttccaatttctatcactttgatctcttttgttgtcttattgctctagctagaacttcgattactgtattgaatagatatggagagagagtaggcagccttgtcttgttgctgattttagtgggattgcttcaagtatccatttaatttgatattggctgatggtttgctatatactgcttttattatgtttaggtaagggccttgaattcttggtctctccaataacttttaatatgaaagggtgttgtattttgtcaaatacttatcagcatttaatgagatgatcatgtaatttttttcctttgagtttgtttatagtggataggttaatggattttcatatattgaaccatccatccctgcatccctgggatgaagcctacttgcttgtggtgaatgatggttttgatgtgttttttgattcagtttgctagaattttattattttcacatacatatttataagctaaattggtctgtagttatctctttgttgggcctttgtgtggtctagatatcagtaactgtggcttcatagaatgaatttgatagtgttccttctgtttctattttatggaatagtttgaagagtattagtactagctcttctttgaaggtctggtagaactcttcactaaagctatctggtcctgggcgttgttgttgggactttttcagacaggtcgatcactggatcaggattgaaggaataagtcctcacacttacggacactcgatctttgaaaaagaagccaaagacatacaatggaaaaatgaaagtgtcttcaacaaatggtgctggtctaactggtggtctggtgtagaaaaatgaaaatagatccatatttatcaccttgcacaaatctcaagtccaggttgatcaaggacctcaacataaaaccacatacactgaatcgaatagaagagaaagtgggacagagcctcaaactcattggcacagggggaaacttcctaaacagaactccagtggctcaggctctaagttcaagaattgataagtgggacctcattaaactgaagagcttctgtaaggcaaaagacacagtcagtaggacaaatagccaacctatagaatgggcaaaaaatctttactaacctcacatctgatagagggctaatagccaaaatatataaagaactcaagaagctaacctccaaaaagccaaataatgcaattaaaaagtgggtatagaactaaacagagaatttacaacagaagcatctcaaatgtaggagaagcactaaaaagaattattcaaagtccttagtcatcaggaaatttcaaatcaaaatgaccctgagattacaccttacaccaatcagatggctaagatcaaaaactcaggtgacagcacatgctggggaggatgtggagaaagagaagcactcctccattgctggtgagattgcaaactggtacaaccactctgggaatcaatctagcagttcctcagaaaataggaaatagatctacttgaagacccagctatactattcttgggcacataccccaaagatgctcctccataccacagggacatgtgctctttgatgttcgtagtgaccttatttgtaataaccagaagctggaaacaatccagatggtcctcaaaggaataatagattgagaaaatgtggttcatttacacaatggaaagctattcagctattaagaatgaggacatcatgagctttgcaggcaaatggatggaactagaaaatatcctgagtgaggtaacccagaaccaaaaggacatatagtatgtactcactaatgagtggatattagctaaaacaaacagaatacccaggatacaacccacagaatttaagaagtttaacatgcaaaaatgccaagtgaggatacttcaatcccacttaatagggggaagaaaataatcaagggaggaagaagataaggatttgggcatgagaggggcaggggaggggaaaaggggaacaggatcaggtatgggggggggggcaggagaaaagcccagagggccagcagaatgaatagaaatatgcagcctcagaaggcgggaggtggggagacgtctagaaagtaccacagatctgggaggtgagagactctcaggactcaatgggagtgaccttggatgaaatgcccaacaaaggggagagagggctcttaagagtccacctccagtagatagtcaaggactcaagaggaggaatggtgataccaacccacagtcaaaaatttttgacccagaagtgttcctctctaaggaaaagaaaagaaagaaagaaactatagtgataaaaatggagaagagacagagggaatggaggtccaatgtcagactcaacttgggatcgatcttaaggggagtttccaagatctgacactattactgatgcaatgttgtgcttacagacaggagcctagcatgaccgtccttctaggggctcaacaaacagctaactgagacagatgcagatacttacacccaaccaatggactgactgaagttggggagccctgtggttgaattatggaaaggctagaagttgagagaggagggtgactccataggaagaccagcagtctcaactaacctggacccctgggagctcccagagactgagccaccaaccaggcagcatcctccctcacccgaacacaaatatacagcagaggactgcctggtctggcctcagtgggaaatgatgtgcctaatcctggagagacttgcaggggccagggaggccttgttgagggtcattctctttcagggagacaggcagcaggaggaatgagatgaggaactgtgggagagggactgggaggggcaatggctggattgtaaataaataaaataataaaaagaaattgagttcattaagtatacatcgtagcacacatggaatgattgatgtttgaaaaagtaagtaaagaattgaaagcagcagaggagttgcgatcagagaccaatcaatagcattccttgcttaccatgtgcaagctacgtgaagattctcataatggacatggagatttggatggattgttttctgagctcttcacatcttatcttgtgtactctgataaataattaccacttaggggttctagtgtatatcaactaagcataattaaaacctgtctcataagatgggaagactttaaggacacactgatcatttactgctaagttttcctggattcaggttccctcctttgattgacgctttcttctgtatactttttgatttacagagacccagcctttactctgaagctatcaaactaccttgtctctggagaaaatttcaaagttttctgtagcattgcctagtttatcagtgtatggtcagtatttcatggataagttatatactgtagatttttcattagggtgggtgagactatgaaaatcacctttcctgtacaccgatttccatcttgcctgccctgaagtgctcttttagagttgaaaacagagctacaagtgacatagcagcttgtgagtgagctcccttctttcattgtgccagcaggaatgaacactacgacctggttaaagaagcaggatccttctcccaatagattgtgattttattctctcctgactggcattgagaccagggatcttaaaggccctctgttcataccatggaatatgttgacagctgacacttccactgagaaaataacaagctagtataaggatgctactgttttgacagatgctcttctttggttgggggtagtaggggcctctttcatttggtaggttcttaatcatgagaaacaaaaagtatttcaacgtcttgagtcatcactgtgaatcttatataagaatttcttcttaaaataattgtagttgaatttagaaggagaagatagtgaagtcttgccttagctgtagtttggcaactatggtagatagatagatagatagatagatagatagatagatagatagatagatgatagatagatagatagatagatgatagatagatagatagatagataggtaaaagccttctgctaggggatgccatgtctcctttataaaactgcagctcatgccgctctctttacctgtttcctttcttgtttcccattcctcttccctgaaatagggaagaaatataattatttttgacccatgtagtagagaattttgtggttttgacagcttgaattggaatcttgtttctgccacttatttgggcagaatagaatctgatagtatttgccatttgctggaactagggcctggacccccattatactcagagcaattaccagcctgctctgaagaactgactttgctagttggtagtggtctggctcatattttatttggtaagagagaaactatcatttaaataatttttgggggtctccaaaaaacagaggagtccaaaagaatctatattctctagttggctataactaaaaaggtaaaattaattttaaaacatacttgaataataacttctgttgatggtacatgccatatatggtggtggaaccaaacattaagaggtcatctatgtgcttagttcttgttggagaaacaggaaatgcacaaacagatgataggttttgctgtatgtttagctgacttggattatcgatgggctctgattttatttaggtttccctaaggttcacctaaaaaaaaatgtacacttgtaagtctgtacaaaatgcttcattagaaatagaaaaggatttagatgagccgggcatggtggcgcatgcctttaatcccagcacttggggggcagaggcaggcagatttctgagttcgaggccagcctggtctacagagtgagttccaggacagccagggctgcacagagaaaccctgtctcgaaaaagaaaaaaaaaaaaaagaaagaaagaaagaaagaaagaaaagaaaagaaaagaaaagaaaagaaaagaaaagaaaagaaaagagaagaaaaggaaaggatttagagcattactggagagatgaataccatttggaaaggctaaaaatggcactggcctggagttggactttgaattaaaagatgtatggtatattaacatacaaaatcatgggtaggttttaggacagaaattatgaaataacgcactcgaattcacaagcactctgcttttgtttggaaaattaactattgcttaagcagtagtttaaaaatagctaattttccattggtgtagagatcttagatcatgttgataattaaaaacaaatatctggaaaggggaacggaagaaataatagtttattctaaattttgacaccaaagtgggtaattatagtctagagattaacagaactctttaccaacaaaaaagtccctttatcatcaaacactaaggtcgtcagtatatatactttaagtgaacccagtgatcctgctaatatcattatggaaatgcaagctctagcacattaagagaatcctgttggggtagtctcctattattgaattttgtaaaaggtttggttcctgaaatttttctacaaataccgtatagtctcattatcgttgctaatagataatacaatgatcttctaaatattcaaatctcactatgttcctttttttcttacaactcgaaatttggagtaaattgttttcattttatattataatattcttctaaaatttaagagaagagtaagtataatctaaagttttatataatgctatcatctaagacattataaataagctttctattcactatagaaaggaaaactaaaccaaaaagaataaagtcccttgaccaagatcatattgtaatttcatggatgacctgagtctagcagccaaatctcttaatttttaatttattaatataccaattttgactactgggcaaaataggttaaaaaacttggacaagtgcttctcagaatactatgaattaagagaacaagaggttgttgagtattttgattggcaagttgttattgggaaaaaatagttgcacccttttaaaagatctccatagtacctttacatgtattatttgtctagtctatcccaacaacttcatgttattaggactgttgttcttttcggtttatatataaaccagaaaatgtaaaaagtgtactgctgaaattcatatatagctgtgttccagagcttgaattcaaaagcagatgatctgagtcagtctcgattctgcttcttcaaaatgagatctggtcagaggaaagttttgttcttatctttccattttccgtgtgtcaaaagtagttttataatttcatattaactatatagttggttaaataaaaagatgcaggaactggagagaaggctcagtggttaagagcaccgaatctctttcaggggacccaggttagaacctcggcacccatatggcagcacaagcgtctgtgactccaatcctagggcatccattgccctcttctgggttctctgtgcactagacacacatgtggtgcacagatacacttgtagataacacactcatacacagaaaatacattaaagactttaaaataatttggcttatatttcatttgaattctatatctctgcatgattttcagacattcagaagaaggtacataggtcctgccttctgtgtggctctgtaactgtagggcagtgccattgaggaagaggcaggaactccttggctgaaaaagtaattttaactcctctgccattcacagtgatacaaccatttttccccttcacttttagattcttttgacttgagacaagattcttaactgaacactgtcatttgtatctgctcctgtgtcactgaggatgagagctgcatactctgcagatctagagattggggttgagggggctacatcagtatttaaaataaaatagtgtcattgagaaaggtgtggttgaacagtctaaaatgcttgataacattgaaagagcttttcccctctcttacaattaattcatgtcgccatttgcatttgtagaaaaagcgcctgacagccccaacaacaccacaagagaagtgcacagcctgaacaataaatctctggaggcattcagcgagtgccacagggctcattaatcttgattatttccagtaatagataactgcacaaatcagctattattcctaatcatgcacataaagatagcggatggataatagcttcttgtgtggttagacagagctaaaatttcagttacaaatacatttctataaattccagcgaatgatgattctactctcttaaagaacgaggagagatgggtgtcactgcagaagaaattggatgttcaaagatgagtttaagacaggaagactaattcattggagacatctgatggcttttgtgttctgtcttaaaatgtgggtttgtttaggttacagtacacagcagaattatgcaatattagtttctaaagctactactattcttttatataaaataaaataaagtcattgagaggtgtttctaggtgtgtttaggaaaaatacccaaaagaaaaatagtggcctcggggcttttgatgatttataaaatgtgccatgtagaccgtgtattgctccaagcatggtcctcagatactgagcagatggatggtgggagggtttgtagatggtggacgatatattgcctctgcactttggattgtctgtaagtgattacatgattttggtttggcttctgttattttaagaggtgacactagactgttactaaaaactcacagggaaaaaaatgagtgtgtgttgagtgctcatgagatttctagctaaggctgcccagctgaaggacattagtaacacccttccattctaaattatgcttttctgtgggcatcacagttgccctgggagatgcctttgttaacaaacaagaagcttttcctgtccgtattcttctaaaaatgtcagtgcttaatgataggatcttttatcaatattattctaccagtagcaatagcccgataacaacaatatgcacttacagaaacattgtgtcataattcatgccttttaaactgatcatattccttgtgacagaacattttcatcaagtttgtaagcttcaagttttattctaacattttctctccctaaaataaactagttttgctttttcgaaacttcaaagaaggtaaggcagcgatctgcttttcacggccttgcatatttttcacgtttgttaaatgttaaagtagaagaatttttaaaccagttttctcctgatggcgtctgtgcaaggcaacatattaggaactaaagcagttcaaaagttcagtgtgagtctttaatgaattctgtagttcaacagacaagaaaaaaaataaaagtaaggcatgtcagaagataataagcactgaggctgtttgggtatcgcagagctgtgcagtaagatatgaatttatacccatggtatgaaagaaaagtgcatggacagcatcagcaaggtatgagcacgagcagatcagggctctctacagaggacggccactgaaccagtgagtcacacgatcagcagtatcaagaaagcataaagtgtaaatgtcaccccactcataggacatgtggcatgatgcattcaggagtttgggattttctgtatcgatgctacagatcggtaagtgttggagtgatatgataatatctgtagttaaaaatactgactcagagatagaatcaggtcacagaggataagctacaaacataatcagtgtgcagattcctgttcactttatcttgccgtggaatatgatgactcgtttaacctgcgtgagtggatatgagacaaccaattcctggacggcaggagggtcccaaaagaatttgtgattttattattactgtagtgtaacaggtcacctcaaacttggtagtttaagaatgctaagcatgtgattgaaaactctgtcaggacacggtgtattgctctgcagtgccttatagctagcttcagctgcagctgttgaaatggctgtgatgactcagatgcctaagactgttatcatctgggcatctggaggcatccttaacttatatatctaacacgcaggataagtgtcctcgaaagctgtgctgtattagacctggtgactagaacatgtatacactctcctctattcaaaaggaaagaatagatctccttttcttcattgggaaatggtatggtttttttgtgcaagaatgttggattattattgaagccatctttgaaaattagtctgtcgaaagtggaggttggcagctggcaacagctgagtcttgttcttcacatatttgagatagctataggattttggagggggaaaggcatagaaaaattaaggaattaatacttcagtctattttaaagggctgattatgtaaagttagaagaaggcaggaatagattagcaaagctctttcaggtctttctatattcagaacaacaagaaaaggagcacaagaaaccagcaggatacttgagagaacataagcctgtggagatgggactaagaaaggatcctcagaaaagagaactttacaggatcctctgaaggaggttcagtgacttgtagaggcagaggacagaaagtaggtactcagggagaaagtgaacagtgtgacaaggaaaagtaacagaaggctgcctgtggagcatcttaatctgatgaagcggagaggaggcatttaaagatgcagcaggctagagactcttacctaacactgcagtgcatacttacatacagcaaaaagcagtctctcaaacgaaaggctttatagttttaaaccttgggaaatagggagtaagtcatgtctgattctatacatgttccctttaaagcattttgtgggttattatttttggaaagcataatagactcactggagagaattctgagtgtttgctttaaaagctcttgaaattaaagagttgggtgcagcattgacaacattgtattcagcaatggactgtgcttagctcagtgacccattcttttaagtagaatgatattaggaggggaaacacacacacacacacacacacacacacacacacacacacacagagagagagagagagaggggggtgggctacctagagtttgaagtttgattatgctcttttatttaactaatttcttaaaataacattactttaggaagccagcccactcctgccattattcagattttattattttaaccagctgccatgtagtcagctcacttgaagacgttaagtgagattgctggtctcttagggatatggaggtgagacctatccctcctaggggactgtccagcaaaggaatgaagaatattgtaagaagcatcagcccctttcaggcttgagaacatcctgacccataggcccaggacttacaagaaatgaggccataaacatgtgatacagccctcagaaaactcctgcgctatgccttggctctcagtgccttgtctagatgttttaaaactgggtatgctatgtttgtgagggactataagaatgccagcttttacagttcaaggagcatcctttctcttgattggggaccgtgcactacagtgttcctatgtgttaaacaaagttttatctccaccaccaccaccaccaccaccaccaccaccaccaccaccaccactaccaccaccatcactgccatcatcatcatcatcagttctgagaattaaacctaaagctttttaggtggtaagcccactgccaatgatctacatccccagcctcaagaatactgttcatatgagcaattatttccatatatgtaaaataatttagggttttgagtttatcagagaatgacattttaaatttgtttgtcaaagaaaaacctgctatgtatggttctggttctaccttgttaaggcaacaactgtcgtctattttgtttctactatttgattccaggctacctgacccatgaacttgaaccagaattgcttgtctccacctcttatctcctcataagtgcattgggattgcagatttatactcctacatccagatatttgcattagtgccagagatcaaactcacatctccaagcttgtgccacaggtgcacttttattggatgagcaaatgctctgagtgcagagcatttttacatatgttgtccaagctgcagtgtcccatcctttataatccagaacgtgcagttaaccgggctcaaattgtcagtgtgatctcagctttttactcagtccttggtctgtattttccagctacaactccagaatcaacgatgagaaaggcaacctgtgatataattatgatggccacagacgttagcgcttgcattcagactaaattaactcttctaaggttgagtcagtattttccattattgtcatgggcaattagtagccacttacaattggttacagttcatttctgctaatggtattacagatgagattggatccacagcacgacagtccatatgagttctcagagactaggtgtccaaatggtattggaagtgattctgttttgcgggccgatttggaaaactgtttttgtgggttgcagtgctttatttgtacagacttttttttatgaaacccatctttatggcaaattaacttgcttgaggccttgtggctgggatgagttgaattgtgagcattaactttatactgagtacgtaacagtgacaactgaatgtaattttagaaatatgagactgttatttttctaaaagatcatcatctcaaagaaatcgcttggaagagaagtctgtccgaactgcgagtgattttggagatttcggttactaagatgtgaaatcagttgatgagcaaggacctgcactgagatgactgagatttctgatgttactctgtcagggtttcctcattcttattccgatgaccctgtgagtgttttaattaaaaaggtgacttgaaacagcttaatgtttttccaaccttttcttagtgaagtgatctacaatacagcctccatagcaaccaactttttttttcccccctgaaaacattttctttgaaagtggaggaaaaaagaaaacaagtcatgtcaatgtgttaccacattggctgatttatttttacagtgtaaaaacgcttgaggaagctttacaagcacggtgggaaaagatgggagcctgtcatgtgtctatgccagggtgtcatggacactgaatcctcgaaagaaagaatatggttttggcagatgagtcttattcatcagatagcgtaaactcctggaatagggaagttggtaagaattctgatgcaaaccctttagggaaatattgcttttgttttacttgaatgtcattttctacattaattattgcaaccattctaacttcccaaaatggcaaataatgttgtgtggaagcactataaatacagtttgatatttttgatagaatagctaggtttgatttgcttttgatcttgaagttattattttcatcaatcattcattattttaaattatatctttgcccattttttgtttttatttttcattaaactgcaagatcagtgcttttcctagatactttgtgaagaagatagacaaaatgacatttcttttgtgcttgttagcaaagtgtttttagattctcttccttcaaagaatgtgctgattcatgcatgtatacacattggggcatacacacatatgctaatgtaatagtcaaagttggtgacttccttagaattcacatctttgcttttgtctggcagtagtatgctgtctggttttcatcaggtccaaaagaaactgggacaaatgacttactgtggcgcctgttagctggccttcagctccctcagcatcacaagtactgttagagtccatgctagcaccctggctcctatcagccttctcagcctgcccctaccataaacttctccagctcatgggcattgcctcctgcagcttctcactcctacataaccttgcacttgagctgtgcaccctcatcgctctctggtcctctggctcccttgctccagtccttttgtattctcctcagccccctactgaatggcctgattctgtctactggtcctgtttagtcaactactttctcttcccactttggactcttcagattcctctcccttaaatctacataaaaatcctcaaccatatcttggagcaatcatgtcctaattctatatagttatattctgaataatttcagcacatgtcatttgaatgtaatccccaaacaatgccaagtgtcccactctgtggctgaatgttgtcctttgtgctgcttggctttaggctttaaaagaagaaaaactaaaacatttacttttatatgcatgtagtgagttgtgtgcgctcatatatgtattcataggtatctatacatgggcatgcgtggaggccagagcaggacatctgctgtcccactccatcactggccacttcattccttttattctatgaaacaggatctctcacttaacttgggagagaggctggcagccaacaagctccagcaattctcttgtctctgttcccaacaactgtggaatatgaactaggatccttgtgcctgcacaacaaactctcatttcctgctgatccataggcttattttttttcctagtcaccagtctacctgcatcaaggtgaaatcagggagcattttaatccacagcctctcaggattgggcagcagcagtttcaaaaaggcatgtaaactttcatttttttttttgctcaagtttttatctatgacacattatttggaaataatttttcagcttaggaaaaggtcttattgcttttcaacatgaaaaaggttatggtagaacttttgtttgtagacagaaaaagaaggacaaatgctgacatgggatactccttgtaggatacactggacacgagcattcatcacattaacagatgacactttgcaattaaacatgagtccaacattgagaattaagaaaatggtgaaacctcttgtaaagttgtcttgttaaaaaaaaaagatgcatttattttaaattggtttttagagtaaaactagtttgtgtgtttagatgtccactgtgcatccttagaagttagtctctcttacatcctcttacctttgtgctgatgccagatctgattttcaaagacaaagaagtagccatactcatctacatttattagattatgcaccacatgcagaggacattcatttacttccagatctgaatgactgatgcttaagtaaagtgtgttaccaaagcaatcatctgttaaaacagttctttttgataagtgttatgaatcaattttatacttaaagtataaattttgctgctctcctctttgttttacctcctatttgtattagttaagaggaggagaaacctgtttggctgttttcctcttcacaaaccctttaaaggaatggcaactgtaatattgatctaagctcattattttgaaggaaaacagcattgtcaaggaaatgatactagctgtaccgtgatatctaattaaaaagaagggtaaatcactaacatataaataaatgtatgtatgtatgttgtaagtcaaatagaaaatcaaagcagttaacgaagtgggtaaattctgccatctctaaagtctctgagtaagctagttgaaagcatgtgtttggatgtctggccaaatcaaggattgccatggaacccttctgaccaaagtaacagaaaataaacataccagaacttcagatgctaagcaggtctcagtatttttcagttgtaagttataaaacaataggtaatcactcttgtctgtgattcggtctgacaccttcaaataattataaccctaacttagataaactgagagagagagagagagagagagagagagagagagagagagagagagagagagaacgaaccatggttgtatttaatcttaaacgcatctggaaacacaccatcaccaccaccaacaacaacaacaaaaaaacctcactactaaccaagtctctcttctcattctattacattagtaacagtttcttatgacttcaaatgcattccaacctaatgttaaaaaaatttaggacagaaaataaagttaagaaatcagttggagttttttattgaatcttgttcaaggtatactattatttcttataaaattctcctgatcctgactgctcctggcagcattcgtattgttttatctaatgcaatttagtagttataatagttaccgtaagtatttcaagttgagctgtcttgcccattactcgttttatggtatgtctatagtaaacattaagaaaccacagctggaagtgatatttccttgaatgattaatttttaaaaaaccctcgaaaacatttatacatcttccgtttgacttaacatattcaaaaggtgtttcaatggtattgtccaatcttgatatacctagagaaagggcagacattttaaaagtacaccttcaagttggggaagtttttcagagttaaaaatagaagatgaaaatagggtagaaaacctgacttcccagttcagtgacttttctgggtagttcctttacctagaaccacttaacttctattttctcaaaggttttctcgactctggaccctgggaccagattggggaaatgtatcgttgcatttcagaagcaggcatcctccagtcctttctggccgctgtctttactttgagacacaaatagctgtcacaaaaaaattagcttgatttttgtgaccaagtacacagggagtatctatcttgctcttccattcctggctttaggatcctgctggtgcctgagtctctagtttcctatgactttgctttttctactaggagcatccccagatggtaggtgtgtctgctctacaccagtattacgaccatcattacctctaatgaaagacttttcagttggttataggttataggttataggttggtttcttgtccaagctctgtccttccagggtataataccatataaccacatgaatgtattaacaacacacgatgtcacataacactgaattgtaggttctcatcattgtgcttcagttactgaagtttgatgaaccatgttactcactgaaggtcatgaggcctgctactgaaccccggcatcccacatgctaaccagaagagctaattcagggttattgaaagaaggactagtgatgcttagactcttgtcagtttgacaaatgagatatatttttatataacctactttggatcaaatagaccaagtcaaggactgttatagcggaaataaagaagctgataagtaaagttcttaccatcaacagagacgagctcttcttcagccatcttcgttctgtctaggcagggtcatgaccctatttgcctttctctaattaatccgagagcagtagactctggtctagaagccaggctaattcaaaagctcatgctaattcttgttcctgctcaggtctgtttgttcttgggtcagggcaagtttgataacaattcaaatccaagtgtactggggaagaataaaaaaaatctctggcatagaaaaaggcatcccagaggagttcataaggaagactctaaaaggaagacagcaaccactgatgtcatcctttctgaaaagaaagaattactacagggtactttctcttcatttaagacggttgctacatttttttctcttttacatatattcattgtgtgtgtgtgtgtgtgtgtgtgtgtgtgtgtgtatgcacaagagcaagtgcatccagtgacagaaataaggaagtcataagacaatgtgtaagattccatcaggcactctgtggctcctgggatcagagctcaggcttagtttcaagcacctttacctgctaagctgtctcaccagccttaagacagaaaaactttgactataacagtaagtaaaaaagcacacttctttctgtataacatacatatctgttctttctctgctgctaatgaggctgtctcatccttgctgtaatttccattaccactaggggttttgatggcagcttggccctgagcacggggtgataacaccacctgggctatgatctgagggagaggagacaacttcctcataactctcttatctcttcaatttgagtagattccaaaggcaaaacccagtttaaaatgcagataacaggcagaaaggcatttagggttgtcctacaagaaatacagatgatttcagctgagatgttggccagagaaatggaagtttcgtcctggggtgtcagactgtcttttaacttcatgagttcctctcatctttcagaatctacacaataggagagttgtttggaaacataggggttacatgaacttgtgacttcctgaggaagtgagtgtactggtagaataccttcaccttttaataccagtgtgttgcaaaattattctgctcttcagtaaaaatgattaatagtccccatccatcacactgtatagcgtggtaatctaagtaccatatagcttataaaatatagttggcaataattcacaaaacagtcatattttaataacatattggaagaagaaaaacccattttcaatatattctggcctatcttccctccagattttgccattaaagataatcttgaagtcaaattttccccttcttcattggtgctttactgtttttctaaacaaaacaaaacaaaacaaaacaaaacaaaaaaaaacaaaagaaaatcaacgtgtttcaaaaaagaaagaaagaaaggaaggaagaaagaaagaaagaaaagaaaagaaaaaagaagagaagagaagagaaagttgagcatcctcatagcacataggcttggaattctagatcttgttccacttctgccttggttgtaatccagttaatatcagtgaaactgattctactacaagtttgtattgttgtttgtgatcaagtaaaaccttttccctacctagtacatttgtaggttgttctccttacttatttgacttgtctttgtcagtaacttatttctcctctcaactatataaaataggaatagagtaagctgctaccattttcatgtcagaattcttttcttactaaatgtaacctcgttatccctattattagaaactcagttttcctactctttaaaaacatgtttatttttataatgtatgtggattgtctgctaagaatgatattaattaaagaaaacaatatttttccctttaaaggtagtcaacacatgggacattaactaggttgagttcataataaatgtaagtagacttttctgaaaaataaaaaaaaatcagtattgtgaagttagtattcattctgatgatggataagtaaatgaaaataagtaatgaaagtaaaaaatgatgcttagccactcttgtagtctccacctctcaccagtatgtgaacagtgaagtttatggctgtaacaatggacaggattttctcatttgggaagagctcccattgtattctataacatgaagcacttttaatgcatggaaaaatgtttagtattcaaagctgtacacctcagggcaggtaggaaaggaaacactcgtctgtgtttgtcactgtctagttatcgtctctgaattggaaagcttccgtcagtaaaacaaaatctctagtaggattgagatggagaaattttgaaacaccagtcaaaactagatatttccttaatacctctgaggctttctagttccagctgtggagcttgactgtctctcatgcagctctcaatccttcacactgtttaattgaacatttagggttgattggaaagagaagccagtagggcatcatggcttggctccggtgagtgagcaagatggaaggtgcagtgactccagagtctgtgtgcacttcagaaagtggtgtgatgaaagactgacaccggagagaagtgaatgtagggaaatgacacaacagtgagaagtgtttaaggctaggggtatgggctggattgtcatgccttgtaatgatgaatagcaacatagatctcaggtgaagacctgttaactctgtgtatgtaagaatcactgcactgtggagcgagtgcagtggtttcctgattcatgtgctcaggagcacaacagtggctgtccaggaggtagacagcaatttcccagaaggtgagctgagtgccaagatggcattcagaactcaaagaaactcataacatgaagaataaaatgtgtatgttctctaccaactccagcatagtcacattcacagtttcatattggtaacaccacaatctaaaattatgttgtagaaaatcagcaaagatgcatctttctctactgaccattaatagataaattttaccactgtaatgaaatgtggggagaaatatcctacctctgtactccccttgcctgtaacaattttactttatactaccctgtgggaaatgtgtctactttactgccccgttctgatctgttttatatgggattataatgatattcacttttgttgacagtttggctcatgacagcaaaatgtcattgttgctgaggtatcctagtttaaagacatttcctaggtaaaagcatcaaattctcacagtaaagttgcagtccaaatttttcaatgtatgtttaatttttttcctttgtataggaacatcaagagtctttattgagctcatcattgtggcagaactactgtgattgaccagtgttcaactttacgttaccacattgaagcttctgaatttgatgcccatctttagaccaaattataatccaatgaatttattacatgcacagaaatgtattaaaggtagtgatcactgtttacttctccctaccttccaatccacaacagaattagggcttcagtggaattcaggagaacttatcagtatgtggtcttaaaaatattgtatttaaaaaaaaaggagaaaacatcagcttgttatttttagtatacaatacgaatcacaaatatctaagtaattcttactttataacacaactccattttctctgtagaaacggcttctgctataagacagaacaaaatttacataacttattcttctggcaacttaactggatttttttttctgcccaggttttggatagcgataaaatgtctttatatattaatgtgtattttccttaaaatgagcttttcttctgccatcacacccaggccagtatcagtcactcttgtaggaacgtgtgctatttttcctcaaattctgggtcctattctcctcctagtattaagtatctgtctgtatccacacaacactgccttccacatctttatctcacgtccttctttttgcttacatttcagttgcttttcattggatttacagtgacgtgtgagtgtcaaatggaaactgaaatgccctgctttccttttccctccacagcatgcatcataatcatgctgactccattccttcaccctcagctgctaattaaacactcgtcctcttccgtgttctttcctacgtacaatttaaaactctacacctctctcttgatagatagacagcccctctcctcagttgtgtaattgcaataacttcttcagtcaccccgagcaggcttgctaaacacactgattttgttaagcccaaatcttattatcttattccttatatataattttccaacaccttacccttccctaagggatgcagtttcaacttcctagcatatcattagaacccctcaaggtgcgacttgagcctcccttttccagtgtagtctttagtaattcctattcactcttcattcaccctgctattcagaatcctccgcattccagactcagttgcctttctatacatgataagtaatttatttttatataggtaattcttctcttcttcccatgacattgtataaatctgtgatacatttccttttatatttttattaacataattacaggaagcttggaagcctagtatcttttaaagggcataatcttgtgaattaaataagcatgagttggaagcctgtttcataccaacggtaactattgaactaagtttttttacttccctgaatcttattttcatcattataaatttttggaagggttgttataatacctaaggtgtattaacactttacttggcatatgttgtgtttgctgtgataatagctatatgtgtctttctttcagtactatgagtaacaataactggggatttacagaaatcaagtcaaaatacttaataaaagtttagcaagaaggctaactcacatgagtgttagtttaatagtctcaagcatgaaagtaaaaattcttatgacatacaatactattctatgagattagaaggctaattattagatatttaaaatttgaaaagatgaaatgtcataacccttacatttggccttagtgtaatgggaaatttggttgtgttgttaatgttcggtcttttttttttttaaattcaggaaagcataggaaatatttagttactgaaatatgaaaaagggactgataatcactcttccttaacttctggcacttgaatcccagcatccatttgattttcaatggcaatgtctgctatccatattgtggcaatgtgtaaaagtatcataaactatgtgaaatgatgcaattctatatatttgatggaagataaattttaaaggattgtctagtaattcaagtttctttgcttgcacttttttttgtatgtctgtaaagtattgtgatgctctaccagagaaccagaatctagaattgttctaatttgctgtcttttgctgtgttacacaccattaaacaaaggcacttaagggaagaatgagagagtatattttctaatacatttctaggccatagtccatctttgaagcaagtcaaacaggaactatgaagtaatgctgcttataggcctaattttactaggtttctactcagagaacttccttatacaagccaggactgtctatccagaggtgatatggtccaccgtgagcttccacatcaattaacaatcaagaaaatgttcacagactagtctgatctaagcaatattaaacttaagttttccttcctaccaggagactctgggttgtgtcaagttgacactgaagataactttgacctcaatgaagattttaacctgtcagcactcaggggacaatgtacaaaggatcctaatgagttctacttacaaagcttgggttacatactaagaatagtgtatggataagaaatagtattgaattacacaataagaaaaaattacataaatgagatacatcttattttcttattgctatttggacttaagtatagtcattttctggtaaaagtagaatattcagagctttcgtgttaatacatgaaatggatgataactcgtaactgttaaagttatgctacatatactgtgtgatagggatcagcagcttgtgaggatgtgagcattgccactggagtagctggcgcttgtaggggtttgttatcacctctgaagagctacagagaataaagccttagtttagctacgttaatacttgggctgaatatctttattttaataatctgattttgttactagcaaaattaaaacactgatctcaatatatgtccatttagaatatatgctagaaacaatttttaattcaaaattaatcaagactcccaatttcccctagatgaaaagtcaaagtaggtattctttctctctacagtagtgtggaagagcacagttctgggccagcttgagtttgaatctggctttgctgggagaatccagaacagagcaagaaagaagcagattgaacatggccagcagattgggcatgaccaggaatatttgcaaaagatgggagactagcaggagacagagtagagaagatatagtagaagcaagagcagagagagaatgtagcaaactagcagggttgtatggaaaatgagtatctgtggggagggagcctgggagctagagggagcttagggtaggggaggaggtataaagagctagaatattagcatagactttgaaatgtgtaacaggtacatgtgatacagagggagcccagaggccagcatgtgctttgatgtgctcttaggtgccacaggtagccatgtgtcccttctgccaggagtaagggaaatgacttcttgtggtggaggggaactagataaagtttctgaggaatgctggcttctctctaactactagaaatcttcctaaagtataggttgagctcatttctggatatttggattgccttctggagtttgcggaattggaatgtcctttggacagggcagtgaatttttagttgtatgaccctgaattgattagcttggttgtagagtacagtttcataagtagaatggaataattacattccaatcacaaactggtattgcagcaattgaaatgatgtttgtaaaagtcaagctcctaatgagtgaggagaggtagccacagttgcgcttacctttcaggcgagtaacccacaattttatttgcctccaaaagcaatactgcattgctgtgtgttcagtctcttttgtgatagctagttggcatttgttagttacctagtaacagtcactgttgagctttctttgttaagttctgtatatctacatgtgtctgtaacttaatgcattttgttgttgtcccaaccgattctaaatggcccctcttcccattgtcttgcatctgctttctcttgtgctctgatctttctcatggttgaagaaacatggagtacttcttcaggatccttgctttattcctccctttgattagttgcataacttggagtttcccccatttaatttgagtttctgatccaacgttctctctccagagaggtttttcttgggctggtgtgatggctcagtgagcagcgaggaaaggtactttctgctgagtttgaaggtcctgggacttacctggtggaaaagagaattgacttctacaggtagtctggtgaccttggagacctccatacacatgccttggcacgtgtgctccctgctctacagatagataaatgtaatttaatgcttaaaagttacacctttctttactagtttgtatagtatatacttagccctacccttagcattacctgtgtagtatattcacttacagatttttttgcattgaaacaaatcagtgttgataagaatacttatcagaataagtattctattaaatattctgattagactttgtaactgtgtaccagaaatttacattacaaagaatatggcagtgtagtactcaccagaatttccaaaatcattttgagaaggtataaccaatgttaaagacaggcttacctcagaaagaacctttgaagctggaatttagtcatcttcactcttttaacattgttcgtaaagtataagcagtatattaattttgtagaactatgaattgaggacgacaaagactcagatgtcctcaggtggaattctcagagttcccatagcacttgcattgaatattttcatcaaggatgcaaaaagtaatataaacctaacagttgatagtcattccttgtactttcatcatcttaatggaaagaggatgatatctgagcaggaaacactcagtgtggtacttgagcaagtcctgcctgagggagggcgactgacttctgggcatataggctttctgtcaagtgaaaattcctgccgtcaaaagtttgtttttttttttaggggacttcatatgtttgagtaactttctaccacagatcttgagagcttctctttctgtgttttgttattttctgctacttctgattccaaagaaagtggagtgctagttcagtggggctcagtgcctgctttaaggaagctttacacaacttatacttaggattctgtgtcagtgtcttacagcctcctctatggctgtaagggctgcaagtttacttcccctaccagcagtgagttcctacctgcagtgccaactcctgtgtccataggccctccggacagcacaaacaactgagaaggattagtgggagatttggcagaacaatgaatattggttaagctgtgtcatttttcctttaaagacaaagttgtatcatcagatttttttacattgtttttatttaataaaaacaggaagtgttttggatttttacactactcatgggaaatcgaagtagggctctatatgtgcaagttgtggctcaacaatatgctcctgtgcactctgggactccttttccatctagcaatagctgcctttatggtcttgtgcgagttcacaaatcttattaccaaacatgttagaagagtttagatagaaatcaacattttccacgtaaagactagttgtagtttgaagtcacactttctgtaatcccagttatttgatgaaaacttcctgggatgtgccagactgtattttatataaacttgtgcttctacttaaggcatcttaattctctactttgattgggaaggcaacattgaggcaagctgtgccacacagtccaggatggcgtctgctttgtgatccttctgtcgccctactgattataagctgaggttataggagtatactgcccatcacttaggtttcctagagccctttcattcagagtttgtgctttttaaccctagaccttgcccacataggagttttcagccagccagcttccatcttccctcgactctcagttgtccttcctcttgattcccactccttctgtaccttcatcctactctcttgtcatgctgcctttacctttccaattcctctcttcctctctcccctgctttttctttctgtatcctctttcaccatctcctttccctactcccttctggttttgctctcttcttttccacctggctcctgtattctttttccctgctctgcactcctgcaggtgcacagtagggataggtaaagcctgttgcttggtacctggcagcaagctgtcctatcagaacatacaggagcgctgtcatttcatttcccctcagcagtacccttccttattccattccccatcaaaggtgatcactgcagagcagcagatctttctttagatgtacatagaaaccatacatttgcacaagtgaatcttataattcatgtaagtaggattatacatttctagttcctgtgttttgtttctttgctacttttagagcaatttaggttgctagggatggatctcatttcttctgacttttccatgatatcctctcatgtaaatcttcactttatcctactagtagtggtcaccctcaagaaatctgtcgttcttgggcattttaagtagttctactgtgaatgtccaggtgtggctttctgggcagtttttctaatactgctctcagggctatagagtaagtccgcactttaccctctacagtgactagacccgctcagcctgcagagagcggtaagtagtgtttcttgttttcccacatcaccacttggacttatttgactttgtatttttagtaaggtagccggtggctatcatttctatgaaatagaactttattttatatactgattaatatttggaatttttttcttctcttaattactcttaatcgcgttctcacgcccggccaggaaagacgcaacaaaccaaaatcttctgcggcaaaactttattgcttacatctttgggagccaggagggcaagcgcccagcgcccagccccaaaaacgaaagccccttcttacatctttaggagccagagctccggcgcgccggggcgcagagcgcgctctattgtttacatctttaggcagcgagcgagcgcagggcgcgcagagccagagagatgccagcgagagagaatggcggaaaccccgtccccttttttaggagcgttatatttcgcctaggacgcatcactccctgattggctgcagcccatggccgagctgacgttcacgggaaaggcagagtacaagtagtcataaaatacccttggcacatgcgcagattatttgtttaccacttagaacacaggatgtcagcgccatcttgtgacggcgaatgtgggggcggctcccaacaaattaccagttacagcttttgtatatctttctgttttctttttcctcattcatttatataggttggatctctatttcattcatttttatatggtaaataactcttgctcattttgttactatactcttataggcatatatgtattcctttaggacttatatgtttaagaaatttttcgtattccatttgcatgagacatagtagttttccaannnnnnnnnnnnnnnnnnnnnnnnnnnnnnnnnnnnnnnnnnnnnnnnnnnnnnnnnnnnnnnnnnnnnnnnnnnnnnnnnnnnnnnnnnnnnnnnnnnnnnnnnnnnnnnnnnnnnnnnnnnnnnnnnnnnnnnnnnnnnnnnnnnnnnnnnnnnnnnnnnnnnnnnnnnnnnnnnnnnnnnnnnnnnnnnnnnnnnnnnnnnnnnnnnnnnnnnnnnnnnnnnnnnnnnnnnnnnnnnnnnnnnnnnnnnnnnnnnnnnnnnnnnnnnnnnnnnnnnnnnnnnnnnnnnnnnnnnnnnnnnnnnnnnnnnnnnnnnnnnnaatggcggaaaccccgtccccttttttaggagcgttatatttcgcctaggacgcatcactccctgattggctgcagcccatggccgagctgacgttcacgggaaaggcagagtacaagtagtcataaaatacccttggcacatgcgcagattatttgtttaccacttagaacacaggatgtcagcgccatcttgtgacggcgaatgtgggggcggctcccaacatctccccctttccttttaataagagcaaataggccacccaactaatgagagtggagatagaggtcaaatccccagtgtgtaggtaaaggagccatgtacaggattagctcttaggctcacaggcttttacccagagcaaccctgacctgctcccgtgtcgttttgcctggagagaagggaactaggacactgaaccttcatgaaagatgacgtgtctccctagaataggctcatatatgccgcagagcctttctactgcagtgcttagccgtgcaactctctcgggctgctgaagcacactcactctatcccgtgcaatgagactagcctcatgggatataagagctgagtggccagcgacctattgcctaagcatagataaccatatatcagggggagcaccatgttctagagctgcaagcgcctgggcaataaccaccttgtctctcctagtttaggccttaagcttacagaccaaccaaagaagcaacactaatccacagcaaagtgatctccaaataatatcaatcccacccattctnnnnnnnnnnnnnnnnnnnnnnnnnnnnnnnnnnnnnnnnnnnnnnnnnnnnnnnnnnnnnnnnnnnnnnnnnnnnnnnnnnnnnnnnnnnnnnnnnnnnnnnnnnnnnnnnnnnnnnnnnnnnnnnnnnnnnnnnnnnnnnnnnnnnnnnnnnnnnnnnnnnnnnnnnnnnnnnnnnnnnnnnnnnnnnnnnnnnnnnnnnnnnnnnnnnnnnnnnnnnnnnnnnnnnnnnnnnnnnnnnnnnnnnnnnnnnnnnnnnnnnnnnnnnnnnnnnnnnnnnnnnnnnnnnnnnnnnnnnnnnnnnnnnnnnnnnnnnnnnnnnnnnnnnnnnnnnnnnnnnnnnnnnnnnnnnnnnnnnnnnnnnnnnnnnnnnnnnnnnnnnnnnnnnnnnnnnnnnnnnnnnnnnnnnnnnnnnnnnnnnnnnnnnnnnnnnnnnnnnnnnnnnnnnnnnnnnnnnnnnnnnnnnnnnnnnnnnnnnnnnnnnnnnnnnnnnnnnnnnnnnnnnnnnnnnnnnnnnnnnnnnnnnnnnnnnnnnnnnnnnnnnnnnnnnnnnnnnnnnnnnnnnnnnnnnnnnnnnnnnnnnnnnnnnnnnnnnnnnnnnnnnnnnnnnnnnnnnnnnnnnnnnnnnnnnnnnnnnnnnnnnnnnnnnnnnnnnnnnnnnnnnnnnnnnnnnnnnnnnnnnnnnnnnnnnnnnnnnnnnnnnnnnnnnnnnnnnnnnnnnnnnnnnnnnnnnnnnnnnnnnnnnnnnnnnnnnnnnnnnnnnnnnnnnnnnnnnnnnnnnnnnnnnnnnnnnnnnnnnnnnnnnnnnnnnnnnnnnnnnnnnnnnnnnnnnnnnnnnnnnnnnnnnnnnnnnnnnnnnnnnnnnnnnnnnnnnnnnnnnnnnnnnnnnnnnnnnnnnnnnnnnnnnnnnnnnnnnnnnnnnnnnnnnnnnnnnnnnnnnnnnnnnnnnnnnnnnnnnnnnnnnnnnnnnnnnnnnnnnnnnnnnnnnnnnnnnnnnnnnnnnnnnnnnnnnnnnnnnnnnnnnnnnnnnnnnnnnnnnnnnnnnnnnnnnnnnnnnnnnnnnnnnnnnnnnnnnnnnnnnnnnnnnnnnnnnnnnnnnnnnnnnnnnnnnnnnnnnnnnnnnnnnnnnnnnnnnnnnnnggtggacaataagaccttgtaggctgcaagagcctgcctctgtcattattgtccagtggcttcacctgctcgggagagcgccttccaggccctaatagccttttcatctgattcagaactattaagaactggcttctctaattgatcttttttcttttctttttccnnnnnnnnnnnnnnnnnnnntctctaattgatcttttttcttttctttttccttttccttccttctaatctctccccaggtattcttacctgacctaaacttttcctcgggttcaagacccttggaaaggcctgtatacttattttgtgaaccatattttctctttgctcctattctctctccccgctttacttctgatagattgtcctgaatttcatctagaatccttagccctatcttaatcacctgataacatgtgaaaaggaacaaaagggcttctaacactagagaaagttcaaggccaaacataccttataaagctattttccactttacttctgatagactgtcttgaatttccttagaaagttcaaggccaggcgtacctcgtaaagctatacttacgggttaccgccgttccccagctgaaaagttctgaattcatgcagttgaatccttcttaacagtctgctttacgggaacctttattaccgcgacccgcagttctggttctggaatgagggatcttccttgcgccggtgaaactcccgtcccgagtttcctcccgggttttttcttcccggattttttctcgtcccggaatttctcgtcccggatttcagcaccaattcttaatcgcgttctcacgcccggccaggaaagacgcaacaaaccaaaatcttctgcggcaaaactttattgcttacatctttgggagccaggagggcaagcgcccagcgcccagccccaaaaacgaaagccccttcttacatctttaggagccagagctccggtgcgccggggcgcagagcgcgctctattgtttacatctttaggcagcgagcgagcgcagggcgcgcagagccagagagatgccagcgagagagaatggcggaaaccccgtccccttttttaggagcgttatatttcgcctaggacgcatcactccctgattggctgcagcccatggccgagctgacgttcacgggaaaggcagagtacaagtagtcataaaatacccttggcacatgcgcagattatttgtttaccacttagaacacaggatgtcagcgccatcttgtgacggcgaatgtgggggcggctcccaacaaattaccagttacagcttttgtatatctttctgttttctttttcctcattcatttatatagttggatctctatttcattcatttttatatggtaaataactcttgctcattttgttactatactcttataggcatatatgtattcctttaggacttatatgtttaagaaatttttcgtattccatttgcatgagacatagtagttttccaatgtaagttatttctcttattttcttaattatacatattaaacatctctaattcagaaatctgaaatgctttgtagcacataacctaagaattgttttcagaaggtttcagatttcagcttcttagattgaaggtgctcaactgctaagtttgaaagcctgaaatctgaaatagttctagaagcagacattcccaataagggccatacagcgtgccctttcatctgacaggcgatacactaggagtgagctggagattgttgtatggtgccaaggcggtaagataaggcttcatcattttctgtctatgtgcggcatccatcttggaaagtatctacctgcttcttaaggattcgcattcttccacaacatacacaaggatctgttttaggaccttgatccaaacagacttgggccccagagtcctctaaaaaagacaggggtgccagaaatgatgaaacctcatgcagagagttaaacactctaggcttttgcatatggcctacttcccattagacatggaaaactcagcgtggcatcccgtagtgtttgtgtgtgtgtgtgtgtgtgtgtgtgtgtgtgtgtgtgtgtgttataacatatataactaactcataacacagaagttgaagatatttaatgaatgtgatacacctagacataaatcagaatgttttggtagacaagaggtcctctgaaacatgggatatgagcagtttcgtcctgtagcacacacagaaaatgctacacggtggcacacacctgtaatctctgtgactggctagccactgtagcaaaatttgggatcctcatggttcaacaagagccccagtctcaaaaaacaaggtagagagtaactgagaaagataccaacatcagtctcttgcctccacatcaaaagtacacacacaatcctgctcaatgtggaggcgcactttatactttgccaatgatgagtctgtgctacttgtgtgcctcagcagagctgttacaaggaaaacatactaagtactagcgaataccccacagtagcttttaaatatactttccaacatatttcttgtctctaggttttgcttacaagagtatgttttctatatttatacctttaaatatacatagtatattaacactgaatttttcaatacttaatgactgttctactcaaggaaatcttattaatgatagaattttccatactgtttttcatcttagccatggaaaaattatctttttttttcaagatggatctcaacatgtagaaagtatatttaaacaatcatagggatacacaatttgacattatgggttgtttgatctgggaaagggaacgagtaactgaaaaaattaaagacagtaacaaagttacactcgtagaaaagcacatatatagagtaaacctgtgtgtctatattcctgaaacataattgcatgcatgtgtgcatgtggacacatacatgtgtgcatgtgtgcatgtgtgcatgtggacacatacagttcaccctagagacgctagagttggttgaactactacaggattatcagttttccagctggtaataaaaggaaatgcttcaaaagggactgtttattgctttttaagttcatacatgcttctagcagcaaagtgtagggtaggtgaggaatagccatataatttccttaatatttgcttaaggaagaatatttaaagtggcagtgaactatagacaacaacaacatacattttggaaaaaatcaatagtagtatatggggcaaaagaaattaatgaaataaaaatgatttgtgaacagggcaatgtcaaatgcacatttatgatgaaatgtagctttgaagctgagatgcaaatgaatggatttcttctctatgcatttcagaagttggtattctaacatcaaagataccatatcccactgttggtatttagagagccagtggacaaggaaatggatgtttttttcaccgtttaagttttactagtgtatcttttacaaaattctgggtttcattttgataatttttgcacatatttaacatgtaattaagtcatcttcaccctaactatcactctctgtcagctgctttccttacccagtcccctcattctgcctaaataaatatttaaagggaaataaatattctttttaataccttggtatatcagtgcttgactttaaaatatctaggacctaaacttaaattctatcttggaagccactgtgctccttgccagtgtgctatatgtatgatgtttgggaaatgcttcttaaagaaaagtcacaattgttttatttgctattacagtggtctttttaggtgttttaaattcactgagaatacataatcagcatcatcattactattaatagaattatcatcaccactagatggtgtgtggggaattagggaccctgaatattatagagtccattttcctgtctgcaatcactaattggctgttaggggaatataggaatctattatagcatagaagaaagggtggataacatttggtgaactcttcttgctaattaaagttgtcttggagatagggtgataaaatgtagccgtggcgaaagatggggtctcccaaacttatacttttgaattaaaatagagcactaaagtaggttttataaatacctttcactggaagcaaatattagttcaactgctgttgggaaaggtttaatttttcagcggagctaagttcttgagaatcccttattaaacctgtgtttccagcaggtctacatatgtgaatttgcctgaattgaagttctggctcatttcccagcctatcctttctatgaagccttccctaaaacatgagaaatgaaataacagttcttgattacacaggtatcatcttccaagtccatcactttttatttcttctttcttttggagctttttagagtctagagggagactctgatgtcaggaaatgtgctgctgttagcttcatgtatgataccgtgtgtctggcttcctctagattgaaaacatagttgcagggcaatataactcattccattcagatgataattgagcaaaaatagctcataaatccaattatgggaaatcattcattgctttgattattatgtttctttcctatttctccttgtgcttaattttgaaaagtaaaatgcagtatctcatgtaaggattctgtttctcctttgtctttcttatcctaccatagagcctctatgctatgacccctcaatacagttcttcaagatacggtgacctataaccataaaattattttgttgctatttcacaactgtaatttttttctagttcagttccagctttatatctccaagtcttacaaccaaagtgtgtggtgtcttcagcaactgggctttactgtctaactttgacaagcaaccagtagcaaggcaaaagccttcatcagtcttggaatatctagggcctcctaaggttaatagctcacatggctctaagatcatttctttccacccacaattggcacccactagacattttcttttatttacatttcaaatgttatttggtttcttcatttcccctccaaaaaacccatatcccattcccccttcccctgctcaccaacctacccactcccgcgtccctgtcctggaattcccctaaactggggcatagaaccttcacaggagcagggatctctcctcccattgatgtccaacaaggccatcctcagctacatatgcagctgtagccatgggtccctccatatgtactctttggttgggggtttagtctctgggaactctggggagtgtactggttggttcatattgatgttcctcctatggggctgcaagctccttcagctcctcccatcctttctctagctcattcattgcagaccttgtcagcaagcacttgttggcttccacagtagtgtctgggtttggtaactgtatatgtaatggatcccccggtggggttagcatgtaggagaatgaaaatcaatccattcttatctccttctacaaagctcaagtccaagtgacctccacataaaaccagcatcactgaaacttatagagaagaaagtggggaagagcctcgagcacatgggcacaggggaagatttcctgaacagaacacccatagcttatgctctaagatcaataattgacaaatgggacctcataaaattgcaaagcttctgtaaggcaaaggatactgtcaataggacaaaacagcaaccaacaaattgggaaaagatctttaccaatcctacatatgatagagggctaatatccagtatatgcaaagaactaaagaaattagactccagaaaaatcaaaataactttatttaaaaatggggtacagagctaaacaaagaattctcaattgaggaatatcgaatggctgagaagtacctaaaatgttcaacatccttagttatcagggaaatgcaaatcaaaacaatcctgagattccacctcacaccagtcagaatggctaagatcaaaaactcaggtgacagcagatgctggcaaagatgtggagaaagaggaacactcctccattgttggtgggattgcaggcttgtacaaccactctggaaatcagtttggcggttcctcagaaaattggacatagttcctgaggacccagctataccactcctgggcatatacccagaagatgctgcaactggtaagaaggacacatgctccactatgttcatagcagccttatttataataaccagaagctggaaagaacccagatgtccctcaacagaggagtggatacagaaaatgtggtacatttacataatggagtactactcagctattaaaaagaatgaatttatgaaattcctaggcaaatggatggacctggagggcatcatcatgagtgaggtaacccaatcacaaaagaacacacacaatatgtactcactgataagtggatattagcccagaacctcggaccacccaagatacaattcacagaccacatgaagctcaagaagagaaagacaaaagtgtggatacttcagtccttcttagaagggggaacaaaatacccatgggaggagatacagagactaagtgtggaacagagactaaaggaaaggccatccagagactgccccacctgggttccagtccatatatagttacaactgtatttttatgactcttatgaatcataatataagtatctaatattcatgataaccgatatgtgatccctgtgagtgggttgttcaacccctaaggttgagatttatgtgttgagaaccactgtgctagagcctagcaaatgacccgctcagcacagacagagaatagaagtccttaacacgatagtgaacagtgacccaaaataacttctaaaactgttctgaacacgggaataatttcatattaattacaagtgtaacagattaattatgattattttacaatgccaggataaagtagatgtgagagttattaaagagtaaacttgctatatagcttgctgaagacaatgtagtgtttcagtgctttaccaaatctttggattgtacaaaatttgtatttgttgcaagacacttaatagctactgaaaatatacattcctacttagatatattcttattgagtcataaatcatagagtttagattgtggttgaaattttgacactgaaaactattgtgtgatttgagggagtggaggatgatgacaggttctgtgaagacaaggttcttacaagtgattctctagttgtgtgttagcaaaaggcttattaaaaaacaacttgttcaatttaaatgttgcaaaaatctttagcctcacaaagatgtttctactctgagaagactagaaatgagtcaattttatgcaacagaaaatacagcaaccttaccatgtaattttgagtcctcctcaggcagtacatttaataagcacatcaaactctcccttttttcctgaaagttcactagctcaataagtaactgagtttcagtgtgtaacactacccatcttgtattagcattggtttgcaaaaatgtagcacatggcttttggcatatattaggagcttagcagacatttttatttatattaatgaatatatatacatatatatgtatatatatgtgtgtatatatatatgtatatatatatatgtatatatatatacatacacacacacacgcacacacacacacacacatatatattatacatttaggaaataaattgtcccatgtgggtatgtggaaatgtacttgtgacaaatccagattgatcaagggcacacctaaaggccagtaaggtgagtgaaacatcaacgctggtacaaacttccattcttttcagcttcatttggactggtaacattgcctggaaactagttgcaagcttcacactaatggctttctgatgaattaaagttgtgtgtcataaggcagctttttatattcatcccagcagctgcatagatcctaatgttatgcatttctcaaatctctattgagttcttgaaagaggaatacaggatacagttgattattaaaaagttttgccctcattttaaaatattcagccattaaaaaatgagaacatcataaattttgcaagcaaattgatggaactagaaaatattatcctgagtgaggtatcccatacccaaaagaacaggtatggtatgtactcactgataagtggattttagccaaaaagtatagaatactcatgatacaacccatagactaaccataagaaggttcaagagaaggaaggcccacgtgaggatgcttcagtcccacttagaaggggaaacaaaataatctgggaggcagagggaaatccaagaggtctagaatggaggagggaggctcccaggcatcaatgtggatgactttagcctaaatgcccaacagtagagagaactgaagaggtcaagtccagtagatagataggatccccagtggagggttgggggctttgggggggtcagtgccctctcagaggcaagagggagggggaatgggaagaagaactcttggagcggggactgggaaggcagacaatatttggaatgtaaataaataagacagtttttttaaaaaaaggtttgcccgccatgcagtggtggcgcacacctttgattccagcacttgggaggcagaggcaggcagatttctgagttcaaggccagcctggtctacggagtgagttccagaacagccagggctacacagagaaaccctgtcttgaaaaaccaaaacaacaacaacaaaaggtttgccctttgttaggtagacaggttgtagggaagctgtttgtgagtcatagggatgtctatctgcagaagggctgtcagacaggaagtaaatttagagacctacttgtcccttccactaatcatcactggtgattggctccagtagtgggcagcagtatttttagaaaaacaggtaatagagaatttctttatgtgcagaacactagttgataagtgttactcaaagctgctccaaaagtcataactgaggcatgacagagctacagaggaaaacaatagatctaatgaacaaaatgtggaaatatgtgagaaaagtgtagatattcaaattactcataactactgttaatccagttcgttactttcccagtttgtcagtggtattaaaaatagtttgcatatgaatcagttttatatatgtctttttaccctatcagagtgaaaaattgtcagatttttcacattctgtactaccttcctttgactatatctgacattcatgctttgacaattggtataaagacaaatatagaggtcattaatccttgtaacagtcaggaacggcctagctctgttttcaagtaatgaatgcaggaagtggcaaatattctttaaagttctattagtagtttctaaagtagaattttgaatgtactagtataattaatgtgtttaattttcttttctgtgaaatctctagacagtacaaatgggccatcattcttcagatgatcaaaaggccaagccacagtagagctttttcctcattctcttccttgacttagatctagagagtagtactgatgaagggctcagggtgggaagccttagaagctcagatgaactacaaactgactggaagactgcaggccctgatagagggctgtgctggttatggctgcctacgatgtctgctttggcttagtacgcttctctctgtggtcaactcatgcagttatttcctagaatttattaataattttccagcctataaattaggaatgacttgcaagtctagggcagtagactggatatccagtgatggccttgattttaaatggcattgcattctaaagctctaaggaatcatgcatggcagtgcacatctgtaaccccagcacttaggaaatcagagcaagaacatcgggagctcaagccattgtgtatatatatagttagttcaagatatatgctagacatatatcttgcttaggacattacatctacctaatattcatgataaaactaaattgcacatatgttataggtatcataacatgagcatgatccttgttcacattaaaatggagcagtagaatttctattcagattgataacatattcgcacaagtaattttaaatgtatgattctccagaacgagtaacactgattggtctgccactgaccctgagcaacgtgattttgaacattcaaagcatcaggcctaggctgcctagtatccatcttagcttgtggttctgatcctgtaaaagcgaactcatacatggacaacatgataggtcatgtcatgcctcacagcctttttccatgctattctttttatagtttttataaggcagaatgtattcaaagcatctgtcttaaaaggtgtttttctctaaaggctatgtagaaaagtttattctctgcttttctggtgttttgtttatttgtgtgtgtgtgtgtgtgtgtgtgtgtgtgtgtgtgtgtgtgtatgtgtttgtctttgtcgttgtcattgtcttgttgctgttgcttacttgcttgcttgtttttaagagagtaatcagaatggcttaattgtcttagacatcccacaaatcagaattaaaagctatacttttttagtttttcaaaaggataagcatgtctgttgactgatacagtcctttgtcaatcttgacttgaacagcaaagatgatgtgctgtctagtaatgtcaaaactaaaggcttattgcccagttgtatatttaaattccattgaaatgtgtgtttcttctccagttttcttcactgtaatttaattcaaaggttggtggtggtgtaggatgtcaactacactggattcttgttcagactttccattctttttttctgttatctcattccaaggggagcaaggtattgttagtgtgtcagctacattggattcttgtttttgtactaagtggcatgaccccaaaccatgttcatatcatccatcctggagatttgagtgaagttagaactctgccctgtttgcttaaaaatgaatttaaaactgctgttgtcagttgttctctggttgggaccagtcgtggctttccacaattctctccatagctgcaaaagaaattgttttaaagagcacaactacactagctgtaggtgtaaggataaacgttagaatgcagttaggaattatactagattggggttttagcagttttagattcttatctaagatccatgaccttattagccacaggtagatggagatatatttgtgcaaatttgagtggtgatggagacatgactggggttggaaggacgaggagagatgaatgatgtaagcacagcacacatgcatgaaatgtaagaagttatttagtacggacatttatgaatgtttcagctacgtaacagaaaaactagagttgctaacttttgaattcttgagcttcatgtttttcttccaactcaacagcatttcctttggatgtccaagggaatgttaaactacataaatgtctgaactcattctgtacaaggatgagacagtcaaaagactgtgctattttacagttcagaagtcatttctcttgtccttgaatcattttagcaggagacaaggaggtcagcaaaccccagttctatttttgtcctgaccaatgactggttgtatgacctttcacaagtcacttaacttctctgccactctctgctaaatgagcatggaaggccctgctcctctgcctgtcgcaaaagtgactttatcaggaaaggtgcagctgctcagagagattggctacttatggcatgttgccagaccaccatccatccaattgtgcagaaacatgacggacagcaactctagtaaggaatgatgactttctaacaagaggcctccctctccctcccactgtccctccctcctcttccttctgttctcccctctgtgttaattagggtgcaatcatttagaggtaatattttttccttaaactttatattttgtgaacaaactcaaacaaattaattttgcacttaaataaaataaagcagtcagttgaacagacttaataagcctgttttctagaagtcaagttttattttactatgaccctcttgctaagaaatagtactttttagagctatgtctgaagatgtagaagatttccagattcatgtaagtagacatagatttcctatgaatgcatataagtaaaatttctctgtgtaaacaaccaaaaaatttaatagaaatatatgctaaacaatcaaatttatctacttattaattgcttatcctcttaattcaaagagaattgacttattcacaaattacatgtttatactataaatttttatttcctttttaatgatagttctagagtatttaaaatactttactttgaaaaactatctttctcccccaaaacagataaaaaataaattagcttttcacataagaatgcagagtgcgaatatacatgaaaatacctttggacgtatccacagtgaccaaagagagtagagtataaaatcaagggctgagtatgttggggttagaaagatagctcagcaggtaagagcacagcctgttcttggaaagcctgagtcctacttcctgagttactacttcctgtggctcaccaccacctgcaatcaatcctgcctccaaataactttggcctccagaggtgccaacactctcatggcataactaacacagactcaaacatacacacatacatactattaaaaattactatttaaaaaagaatcaggtgtgtttaggtttgaatccttactgccttttgtttaacaaattctgacttggctaaagtagaattcaccattttatgtagtgtgatgagtttttatgtttgaaaacagttgttcaacatcattagttcttcatatatcaattttcctgtctcagacttttccctttttttatgacaagaacttgatgtgaggatatatccagtgccagctctccaggttatgagagaattcatttgcaacagaagtcagtctttccttagacgccattaccagacacagagaggtcatctttgatgagtttgtaacagcaggaactatagtaatgtgctgatagaagtatacatttctgcctattaatttatacattagagaagaaatgagaaccttacttgatagccattgagcacatactttctgggtagttatttatcaaatagtagggctgttctcaattttaccatttgtccaagaagggaaaagacaactaggtgagttttgcttcaagtgtctaatgttctagcactttagtatcatttttaaataacagcaaatttaccaagagaatacaaaactcaagcatcaaactatttgaagaattacctaatctgcaccacctttgaaatctctgtattaagaattcccagccaggcagtggtggcgcatgcctttaatcccagcacttggtaggcagaggcaggtagatttctgagttcgaggccagcctggtctacaaagtgagttccaggacatccaggactatacagagaaaccctgtctcgaaaaaccaaaataaacaaacaaacaaaacaaacaacaacaacaacaacaaaatcccaaagtcgtattttgaagtccaagacaacattcagggagcacacttgttctaaaatcaattcagattagacaagctatgttataccagcttgcaatcatgccagcagtggaggagtgttcctctttcaccacatccttgccagcatctgctgtcacctgagtttttgatcttcaccattttctgactggtatgaggtgaaatctcagggttgttttgatttgcatttccctgatgactaaggatgttgaacatttctttaggtacttctcagccattcagtattcctcagttaaaagttctttgtttagctctgtaccccatttttaataggtttattttggttctctggagtctaacttcttgagttctttgtatatatttgatattaccctctaactgttataggcttggtaacgatcttttcccaatctgttggttgctcttttgtcctattgacagtgtcctttgccttacggaagttttgtaattttatgaggtcccatttgttaattcttgatcttagagcataagctattattggtgtgctgttcaggaaaatttcccctgtgcccatgtgcttgaggctcttccccactttcttttttgttagattcagtgtatctggttgtatgtggaggtccttgatccacttggacttgagctttgtacaaggagataagaatggatggatttgcattcttgtacatgctaagcaccagttgaaccaccacatttgttgaaaatgccatctcccccccccccactggatggttttagatactttgtcaaagataaagtgaccataggtgtgtgggttcatcatgttggcagttcctcagaaaattggacccagctatagcactcctggacatatacccagaagatgctgcaactggtaagaaggacacatgctccactatgttcatagcagccttatttataatagccagaagctagaaaggacccagatgtccctcaacagaggaatggatacagaaaatgtggtacatttacacaatggagtactactcagctattaaaaagaatgaatttatgaaattcttaggcaaatggatggaactagaaaatatcatcctgagtgaggtaacccaatcacaaaacacatgctatgtacttactgataagtggatattagctcagaagctcagagtactcaagatacaattcacagaccacaatctcaagaaggaagacaaaaggatggattcttcagtccttcttaaaatggggaacagaggctgaaggaaaggccatccagagactgctccacctggggatccatgcagtcaccaaacccagacactattgtggatgccaacaagtacttgctgacagaagcttgatatagctgtctcctgagaggttctaccagtgcctaacaaatacagaggtggatgtttgcagccaaccattggactgagtacagagtcctcaatggaagagttagagaaaggacctaaggagctgaatttgtttgcagccccataggaggaacaacaatatgaactaaccagtatctccagagctcccagggagctcccaaccaaagaatacacatgcagggacccatggctacagctgcatatgtagcagatggccttgttgggcatcagtgggaggaaaggcccctgcccctgtgtaggggaatgccagggcgtggaagcaggagtgggtgggttggtgagcaagggggaggtgggtggggacaggaggttttcggacgggaaaccaggaaaggggataacatttgaaatgtaaataaagaaaatatctgatattatatataatctatcttggtatttttcaggatagtcactctccatgagcttgtgactgaatagcacatataagatatttgagtatttataggtatagtctgtttttctaatgctacatcactatgcccatcactttcagtttgtactgctcttccttctctccttggtgcatttccatttctccttctgcagttatttggggtgttactgtgtgtccaccgccgtactagtttgtggtcacttttatggacagaaacaaaagtgattcattaacttgagtatcttattaccaaataaagttagacagttacttaattttcaaactaaacataaattgttaattttgagaagtacaatggaaagttttgtctcaaagctgaaagttggtgagcttctttgctttttttaacttttggtttctggaacacgatggtgcctttttattattgaagaatgtttccctaatgcttcttgtagacattgtctttagggcttttgggaagtcttcttctgaatgcatagaactcagtctgcttagagaaaggctctggtgacagaaaagtaaacatgatacctttaagtgagtcagttaggtcttaaaggaagggcccagcaccagctaaaggcctttgtcttttggatttgcccaataactgtagactagaatgacaggcagaaaatcacttcatcttaaagggtctggactattccagctaaagtaccgcgaaaatagagcatctgtgactactgatttttggttcttactctatttctgttatgtttacaagagggaaacacttcttttcctttctgtacatggtaccaatctgcatttggagaggttgttttgaaactgtatcaatgctgcaggccttggctatgtcctctgaatatggcattatgacagcaccaacactgcccaggactactgtgttttccagcctcttgacctcatttcgcttccctgcttttgacaatgaggatggcagccattagaatgtacactacttactatgagtttagtaaccaaggacatgtgttttacataatatagaatcaaattccagaagctttcatgatgttcagatattggcaaagtcaaaaaaaaaaaaaaaaagtagttggttgtcttgctggcttccaaccagttagctgtacccattagacagaaacaacctaaagctatattttggtgttcattcaaaaggtcttcaagaaatagttcattcacagctagtaagtgctttctaactagataaattatagtaacttgtcctttcttctcatgctgcatctgctccattaaaactagaagaaatactttcccaaacacaagtaatccaaatcaaataaaataatgtcctctgcagaactttaaagctccatttatatacagcaatatctacaggtcaaatattttggccaataagataactttaatcttcagtgaagttatactattggactaaagcagaaagttactgtagcacttgaaactgctctcaggaagggagatgtcagggtagctggttcagggccagttaggatagtgcttagcttacaggaccttcctgcgggaatcaggagaacatctgctctatcatagaatgctgtcacatcttggacccagatttatatttttgaatatcagtgtctgcactgttctgttttctgataatagaaaagcttaaccaagactgataggcttataaacaaaagaagtttctagaagctgggaggcccatgagtgtgatgatgatatgtgaaaagggccttcaagctttgccataatattgtagaagggtcatcctgcaaacacaagacagagaagaaaaactgatccactgaaaatcaaaaatgaagaaaaaaagccagactgtggaggtgcactttgatcccagcacttgaaagtcagatgcagttggagctccatgagtttgaggccagcctggtctacagagggagtccaggacagccaacgctcacacagaacacacacacacacacacacacacacacacacacacacacacacacacacacacacacacagcagctcacactgagatacctaaccctctcctgctgtagtagcatgaatccagttatagggcgcttccctaatctcctcagggcttataaggcccaccactcaacttccttgtgttgagaattatgtttcagcatagattttagagaagacatgcaaagtatggctgtcagaagaaaggaaaagaaggaaagggaaaaatgtaacgtgaattttccctgaccccctctctactatcctgcttggcagtttttggagtagaagtatgtagtagagagtgatctgcctgcactgcctaccttgggaagtttagtgctctgaagtatccttatttacaaagatttttttgaaatcttcaggtacatgaaataactgagtattggaggccagaacccagtgtgtgtgagtcataattcctggctttaaacttttctggtcattcctttatagctatatctttaacccttctccattcctttcctctgaccactgcaaaactcagctggtattaagaaataaagaatataaaaataatgggcctaagagacacagtaggactctgatgccaatatatgcaatagtgtgcgaagagttcgttttttgcctcttaatttgttttgatttcttctagtttgggttttgaggtctcactgtagagccctagctagtctgaaacgtacttgcagagtaagctggcctcaaacctgaggagatcatcctgcttctgcatcctgagtgctgcagaggctcctacacatttctgagacagaatgaagataggtagttgaaactcacatttggttagacttctcagaggtctgcaatgtggctgggctgaatagtctgtggattttgggatggttctttgagaattggaagtacttagtctataagaatgcatgtttcttttgtcttacacattgttcagcttgctctagtgattctactgcctgatgacagcctggtgaagtacttttgacaagtagattcttacaaagctaatatgtacagaggtgtgaacacctgtgtcttcccattgcgttctctttctccctttcttctacccttattcgttcctctcttgattagacatgtgcatccaaaaaaaccttacaatataatcatgtttattattcttgatttttctgtgaaatgcaatccagtttttattcctagtacagatgaaaatgaaaatggtggtgagataacagtagctcatctcaagtaagaagcagcataaggtgcatcctattgatccattccatgattttcatagctcagcaaaccagggttatattttgaaataaaactgatagtttttaaaatcttcaaaacacaaaaagttttctgtaacagtgccaatcattcattaatttatctaccccacactatacatgcacacacatatatacatatttgttaaatgcctgcactgtgtcaaaaactaatatatagatttacagccatacattcattataccttatggatgaaactgaaaaagatgttctaattattttgtagatcttatgagtaacatattatgctctgattcacacttactcttaaaaatactcaaattgcttcttacagacaagcatggaagagcaaaaagaaactgactgacgttgtctttcttgatacaacaggaatattccagacagacatgtggcagaacattctgctataccgtgtgtggttgctttactacttacttcaaactacatggcttcctttctaataggaactacttagctgcaccattaagtaaggctctgctttgaatctgacctgatcagtcttagcaatggccaagaatttagacaaatgtagtgtgaagacctctgagccccagctgagagcagctcattaaacagcaggttccagacaaaccagacccctaagctgccatccaaccagagtctagagagagaaaccatgctcatttctcttgttgactgtaaaattaattttcttgaacgtaaatctaaactactgtgagccagaaatcaagtttattcaatgacctttgttatttgtaatgtgggcataggggagaagcccctgagtatgaaccattaataaagaaaggcagtttaaatagataatttagtttaaaaaaatcactttcatacaggcaaccagacagaagctagctaacacaaccttcaaaactaaattctgaagacattgattgagagtgtcaactctttccattcacctccttttaataaatggatggccagttacttaataattgccttcgttttaagttgctttaatacagcaagtggtctagaattgatgcttgtaacgtaatagttatattttgtcacattgcctgtcacctctcagttgcactatcccaattccttactttgtcactacaaccttaaatccctaccactcccattaaagtgtctacttgcctcctaaaactcctttagatgtttgtggttttttttgttgttgttgttgttgttgttttttaatgtcttccttggcaacttaatttatgtctgccattttccccccatccttgtctgccggttttaaaacagtaatattatgttctctaaattttctgttttgtaaaacctctgccttttgatttgctttttctttctttctattttgatgtaaacgatttacctcagtcctctggcaaacacacacagtgtattttcagtacttttcctgaagttttctactctttagaggactttctgtctacttagagccaacaattatggtagctcctgtttctttgactagccaaaatgttttgtttagaaagcaatggacctttgaggatggtttgttctatgactagtagcaaagaagagggcaatatcaataactccgttaaatttccacagtatgtattttataaaatctctcataatcctttctttagtaaccaagaaatcctattttcaaaaccacatgtgatctttgtatctctcagccaattcttgtgggggttttttgttgttgttgttgttgtagttttgtttatttgagtgttttttttttttggtctttttttttttttttgtcttttttttcctctcacacatctttatattcatgcttctggatattaagattagatccaaatgcctgcctaggtttgaattcatctctcacaaagactataatgttaaagaaattagcagtaagagaggatttaaacatatatttagaaatttctaaggtggtattatacatacaaaagcatacatatatatcaatgttttatcaatgaaatgagattgtcttctcaaaactttgctgagacagtcattgttggtatatattttaaaatgtcattctcttggttaaatctcgttgtagctatttaatatttacagatctctattcgcaacaattgttttagtacacaaaattgattagaaggagaaggggataaaacagttatggctggaccctgaatgagtgtatgtagtctggtatattttttaatgaatatactattagtagttcacatttcaatttctcccactgcttataacaattagcatttaccttaccattttattacacatcccagggcatgtgtttttcatcagtcatttgtgacaagatttttagccattcactcatttatgtatttaccttgagatagctttattgcagctcaaaaatttcctaattataaattggaagtataaaattgtctcatctgataaccttggagttagatactattatctatttttattatctatgattattatgtttacacaaacatggtccgtaagtagttttgatcttttactctgatgccctacatcacactagtactttaaagcatttatcattaaaagtattgagatatgaaatatatatttgtatttattgaattgtgtcagtggccaagttttaaagaataaaagagtctgtttataaccagattacatgtttaagagcataatctacttgtaaatattacaatactactagcaaatctcttataaaatatatttgttaactagtaatattgtttagaaatatgaaaatttctgaaactaatgtctgtaaatctactaacatttttctgcttcactttcccaccttgatcttatatacaactatttcttatatattttattgctagtttatatacaactagatttaaagaaggcttatccatttaatgatagaatacaagatatccctgaaacaatctcagagttacttattgtgataagaaaatatccatcaaaatatccaagattttatacacaacacacacacacacacagacacacacacatgactatttgtaaccaagacattatgtagactgacttgcttcaagctctgcaattacactaaaataagcctcatgaaaataaagctttagtgtttgattatttggcttaataataataaaaaaaacttatcggttagagatactattgaggatatgcctagatcaaagagccagtttgaaagatcatggtgaccttaacacatgcattacaggagtgctgctctctgcagtactgtcagtttcaggaaaggtactgtgtttcagaagcacacagtggacattgaggattgttactccagagaagatgccgtgttgtttttgtgggccaggtgcagtgtcaatctcttggattattactcttttttaaaagatttatttattttatttatttgagtacactgcagctatcttcagacacatcagaagatggttgtgagccaccatgtggttgctgggaattgaactcaggacctttggaagagcagtcagcgctcctaaccactgagccatctctccagcccagattattactctttaaaaccaaaccaaaccaaaaatcagatagcttttggaaaccctagatataaaaacatgctctaaaagctttataggttttagagatgttcgtaatatcccagtatactaaagctaacaaacaatattttgtggcaaacaattttggccatttattagtcatagactacctcctttagtactgtctgtattgtattgcccatgaagctgtatgttgtatttttcactattgtagtagttattataactgcatattataatgactatgttcgggttgttgagatgtgtgtgtgtgtgtgtgtgtgtgtgtgtgtgtgtgtgtgtctgtctgtttgtttatgtgtgtggtgtgtgtgtgtgtgtgtgtgtgtgtgtgtgtgtgtgtgtatgtttgtgtgttccattttctgtcagcttgacacaaattagagttatctggaaggaggaaacctcaattgaaaaaaaaacctccataaaatttcctgtagaaatctgtagagctttatcttgatcaattattgacctgagatggcccagtccactgtgaggtgccattgctagacaggtggccctactattatctgtaagaaaaaagcaggtattgcaagctctggggagaaagctataagaagccttcttctgtggcctctgtgtcagttgttgcctctgggttctgctgtaacctgtaagccatttcctccacattgcctttcgtggtgtttgactggagctatagaacaacctaagctgaaggacaaagggaagcttacactcctttatgtagaatatgctctgtagcttctgggaggtcagtgattaattgaccttgctttgtttggttttatttggcgttgttttgttttgttttgtttttcatggaaaaacagttctttagtcaaagagcaatcatttgaatcttatagatacttagacataaaggccagcttcctgaatggtaacacttttacttagtagaaattgaatttctactaactcatagaaaaatacttattctttattaaaatatttattattgaaataatattttgaacagatactgatttgtttctgttttctgaggcagtatcatgtaaaataaggctagccttaaactcaaaatgtagctaaggatgaacacaaattcctgattttcctctgtatatttccaggcatcaattaaattctaattactgcattctggggtaaaactcactataaaaagtgaaaacttctgataattcagatctttattaaacaagttagaattatatccatgttttagatacttttttattgctgtgatgagaaactatgtccaaggcaacttaaaaaagaaaacatttgtttggggtttatagtttgaaagggttaaagtctatcatacatcgtgggaaacacggcaacaggcatgtgtgcatagcactagatcagtcacttgatccaccctacaaaccagagagctaactctgatagcctgagcttttcaaatgtcaatgtcaaagccccagtgatgtacctcctccagcaatgacactccccatccttcccgaacagtttcaccaactcaagactaaatattcaaacatatatgagcctatagggccatttgtgtttaaaccatacaacatatctgtgcagtctaactctccctgtattagttttatcatccggtccccttgcctttgtgtttaagaattcctatggtgattaaagatgccagtagtgtaaagtcaagacataaaaagagagggtcggaaagtcacttttgctatttcttgctaaagatataattttgaaaggagcttctaagtattcttacctcattaatccatttgtacatttttctcaagtagagtatttttaaagagggtaagccatacaggacagcagagtattaagagaaaaattaaagatgcccttcaatgatgataaagactaatgtggccttaacagtacagctaaggagtgaaaacacactactttcatacttccacagaagaaaatagagccctagaaatcaatatgaccatgaatactcaaggttaagtacgctaaacaatgacaggaccaatgaaatagtcttggtgttattttcaatttcagttatagaaagttacagctcattcaaggcctaatatccataatgtagtctgacagcagcaacatcactctactggtaaaaagattgcagggaaaagcagtgataaatgtctgccttggatagaaaatgacacagagttgtctaattgcatgtccaaagggtatcataggaaacacaaaatagaaatcttaggcctttgttatcatgctttcacaatattgattatttgcagtgttatctactttgtttaatcaccatcagagtttctcgaccttaaaacagaaaaaaaggaaggagtcagcactcaggtgatttcctgtaaacctgcttcccaccttaatttgtaaaataaaggagagctgatgattgggcagataaaaggaaaggtggtgctgaaggtgggaggagagaaagaaggaagagaaaatggaagagagagaggtcacagaggaggaggaagaaaagcagagaggaagcacatggcctggagaaatgcaagttctaaggggtctcatagatggagaagatggcagtgtagcagtagatctgcccagtctcggcgcacagcatgtattcatattaattgtgttgtgttttcattgctggggcatatttgggttggagatttaccgcaacattccgccactttttaaatagtcggctgaaattggaatccaccagcgaactaagtccaagctagccgatatccttggctctggaagtgctcgccctgacatatccagaggcatgctttactaatctaggtacccctcatctgggaatgttgattatgaagtttgacctgacatagttacgtcgtctctgctttagccctgttaacatcttcaactctctttggtagaggaaaattgagcctcaaaagactaggtaggggattgcaccagttggttccttctgtttgcttctgcttgcatacgtgtagcctctgcctgacttgatcttcactaaccagtttctcatccctgaaagtctagtaaaatatatgctttatcacataatccttagggacagatctgcttaaaattttgaaatcctttaaaaagctccttgtcagggttgggaaagtgactcagagttggagtgtgagctgctccttccaggtctttgtctcagaaccctctgtaactacagttccagagcatccaatgctctcatctggcctttgccagtccacccatacatataaaaagttttctcaaaagaaatcctttttttctcagcaaatgttaagcaaaaccaggaaaactcagtatttgtgcaataacttgtgaggtattttcaaagatgccttacttctatcagaagtaaattttttgagtattagattacaaatacatacatgaatattaattcattccacagactattaaatgattagcctaaacatatactttgctatagttaacagtaattctcttgagaagagaaaagagggggctggtgagatggctcagtgggtaagagcacccgactgctcctccatgaaggtctggagttcaaatcccagcaaccacatggtggctcacaaccatctgtaacgagatctgactccctcttctggagtgtctgaagtcagctacagtgtacttatatataataaataaataaatctttaaaaaaaaagagagaagagaaaagagtatcattgctgtcttgtcccttattctagccccacgcacaggcatgcacccagtaaaaacgtcagcacagcctcgtgtacagcgctagactgctgcgaggagcggagcatttgcccttgcactgttgaaagagttctcttctgatgctgtggctcttcctctttagagcaaaatgggaaagatctgctttagggagctctgaacacaagcgcgaagcaggaacagatcaccgggtattatctcagaaatgtagcccgttaagaattttagatggctccaagtgaggcttggagtataaagctttttggagtttgggattggttggctatcactgctgtgttctcccaagacaggctgtccttttccttctggtgcttaaatgtgtgctgtgttacagacctccagtgagtgcctacaaggtgagagaaggaatgaatgttgtccttaagtgttctcactgtttacagtggcctatgaagagcaaagctaagaatcaaaggctacaaaggaaactgtcccttcctctgcctccaccattcagaattgccctctggttggagaggagggaccttagcagggggtcgtatgtttgttatttaaatgcatgttgctttttaaatagtaaaaacatctgtgacctctggtttaacagaatatcaccttcacagtgcctactgtcaatgacagttgcgattttaagtcatcaggtgatccttaaaatgctggtttctgcaacttcccagaatccatataggttccttttgtaaaaaggtatgtttattaaccaatgctttgaaggacactgcaagagaaaaacaaaaaatgaatgttcagcttcaacttgctgcacctttcattttgagaaatcacctgcacctatcagttctagcatattatgacaatattttactctctctcagttttatttaagctatgtgaaaaaatactgctcaaggtttctccaacagtactttgaaggctcagtacttgttttaaaataatttatattcaggctggcgagatggctcagtgggtaagagcactgactgctcttccaaaggttctgagttcaaatcccagcaaccacatggtggctcacaaccacccgtaatgagatctgacagcctcttctggtgtgtctgaagacagctacagtgtacttacattaaataaataaataaataaataaataaataaataaataaataatttatattcaacctctatgttaacccgcacacctccttttcatgatttctcacataccggatggccctctttttcatggatggcattagagagtgtgggtcagcagtcaagtgcacaggctgtgcattgtgtctcctttggttgctgaaagccactcaactctcaagaataacatttctttttgactcaattcaaagctttgcaaacaaaaaacttctaaaaagtaaaataattttatcaggtggaggcagagagccagtttctcagagttcctttaaactacacacatatatgtgcccacacatatcacacacaaaataatatttggacaggtatcatgagctgcctttgtttagtttgtttcaaatctgttttccttagggaagccaggatactaaaatgaatggcatatgttcgttaggagtccatcttttgaatatgttgaacagtgttctccctcctaaaaatatgtagtaacttaagatggaacctcgggtgctgtactgaaaagggcccttcctaaattatcaagtctaagggagaaagtcagtacttaccatgaacttggacttggaatgatatgtaactaaactgatggaagctaatatgtaattactgttttttacagtgtaattatagtgattatattctatttctattttcctttggaaaacacaatacaataactccaaatgtaggcttaatgacaagtcatgaaaataaattatcattgtattaagaacttgtattattattattattattgttgttgttgttgttattgtttcgtttttcgaaatacagagttttctctgtgtagccctggctgttctggagctcactctgaagaccaggctgacctcaaactcagaaatccacctgcctctgcctcccaagtgcttaatcaaaggtgtgcgccaccactgcctggtgcttttttgtttttgtcttgttttttagtagaacttgtcagttggtacatataaagaataactatacaagtagtaattctgaaaaatactacttttaagggaagtggaatgaaagaatgtgatgtttctgccaaagtgcgaggttatggtgtgaagcagaagcagagtatggtgggcagctcgtctctaagccgctttatagatgctgtttacacagcatagtgtttgagttataaagttagattttaagtgataaaaactttgttttaagaagataaatgtgcaaagtatacttttaaattgtttgtaaagaatcttaaaaagaaatactgttataattcatgattatttttcaatcctcaacctactttttgaggaatattttgaaatgactaagaaaaacttgcattaataccaatagtatgatgtgtaaaaagtagccatattaaggttttctcataaatattttgggccaaatacatagtttagaccactcctttccatttctagcacctcgaagtcaactacatcatttatctttattttctttaacatctcctcaagtcatatctacatgtgcctcaagtctgcctgtggactcccttccctcactccatattattaacattggatactaaaccacttccagtttcttacctgccttctgaatatttcacttagtctattaaaaaaaaaagcccaaaaggacactttagggattgaccatatatagcccagtaagaccttggaagacctactcactgtttaatcagttaatcagagagaactaaacttcatttaaaagaaatctacttggtatgttttgtaagtacccaaaaggtcagtaattccttggaagtcatcctctttggctgtcacagtaacccttttcatgtgggaataatattttgtccagtctcctttttttaaaaccttttatttatttacattggctttgaaaaagtcattgcattttatgaacgtgtgtttctaaccataaaaattttttattatattgaaaacatatataaaatactggattatctttgttatcttataaatatatcaatttcagtttaatgtcctcagcatttaaaaaattaattttctgttgaggtcttggaaccacttggagttgagttttgtgaagggtagtaagtatgtatctgtatgtattcttctatatttggacatgtgaagcaatgctgtggaaagtttttctaagactagtgaagaactgaagaagtcctgaatctttttttttttaatctgcttctgtctaagaagccaacacatctgcgcttcataggtgctctgcgtttgagttgtagtgaagtgtttactgctcaccagatgtaatgggttagttccttatagacaggactaggggagggcatataaacactaacactgaaactctgaaatggcaccagggcaagtgaattttattttttgttcactattggtggtttaaaaagtccctccatgcaattattgtgaacaccttgctttgtggtcacttaagattggcggggtggtggtggacagcagtccacatgtccctggggtggtggtgggcagtagtacacatgtccctggggtggtggtagacagcagttcacatgtccctggcatttgttcagagcattgtgcataatgtaatgctctttcataaaataaattttatgacttttaaaataaatttagtaaacctaacaaaaaatttggcgcatgcctttaaacccaacacttgggaggcagaggcaggcagatttctgagttcgaggctagcctggtctacaaagtgagttcagaacagccagggctatacagagaaaccctgtctcgaaaaaaaaaaaaaaattctgaaatcatgtacagactcacgttaaaaaataggacaacccagcagtgggagcagaggccagcaggtatgtgagttccaggctggccttacctatacagtgaattcagactaatcagagatccacagtgagtcagtctgtctgcctttctgtagttatcattcttatccttcttttgtccctccctgtcccctctctttttcctgtttctccttttgtctctttttttcctttcctccttactcccttatcccatttgtctctgtctgtctccctctcttatacatacagacacatgtatctacatatatgtagatacgataatagatatataacattcttagattcatttatagagttttataggtattcttcagtatgtatttttgatatctgtgcaggctctaaaaatgaaaacagggtttctttgaacaggacccttatctaagtcatattcatgaagctttatttatttagagctttctaagatgtttttcagcagcaaataaaattttgccaaataaatggaggtaaggggtgtgcattcccatgctggaaaacagtgggggagagtacgttgggcacagtctgggacacatgataagctaatgtccaggacagagactttgagtaggatagattgataatggtgaagttatatagaatcagacaccagctggcttctagaaagttaagacccttttcaagtgtttgaagattatctaaaggaactttaaaagattttaaggagcaacaggcacatatttacatccttgaaatgtcctccagaagaaagtggaaaatgcattagtgtggacaagacacacttgaagtggaaagaataccaagcaacaggctgtgcttcctcaggcccttggccactgactttgaagtacagaattattcatctctgcgtatttagttagttagttcctcttgcacaggatgtgtcttggtaaatgaaactgagaattcaaagaactatttattagacttgattcctgtcctcaagacatttagagtatattttagaagaaaaacaaaagcataatgtatagtatataacgttttaagaccttccagtgaatttttatgtgcaatgcctcttttgatcttaaaatactgtgatctctcagagaataactgacgttttctaaatgaaaacttggacacaattcatcaatataattccaaaccagctgcttgaagtcataggtatatgattttgctactacactgttaaacaataagattatggggtggtgtatatgataaaaatatgtgacactgtatataactcctcagacacttgaacagagaagagctatgtggtaaatttggaaaattggtaggtctgtcttgagtgataatttcttaatggagtaggatgccagctccagggtactactgtaaaggaagaaatgtatggaagcggacagcaatgtgtgagacttagtatattgtggttcttgtaggagagcttgaaaagatttggactcatctgtgaaatctatttaaaagtaaagaacattagtgtcagtatttaaagtgtatggacttttctaaatagtatgcaagaaatagaattagaaaaaaagaactcgagccgggcgtggtggcgcacgcctttaatcccagcactcaggaggcagaggctggcggatctctgagttcgaggccagcctggtctacaaagtgagttccaggacagccagggctacacagagaaaccctgtctcaaaaacaaaaacaagcaaacaaaaacaaaaacaaaaaaagaaaaaagaactctgaaatatcacttgcaatgaatggcaggataggatgtaaggccaggtagggagatgttctgattgctccatggtttcccttcctccagtggcaaacatatgcagttgttcagtttcttcctcacatcttttatgaaccttgagttaccaccttgtcttcccacccctgtactgttcatggcatctttatatagtctgttatatgaaatgctttgttgttctttaatcgccatgcttaggaagtttggaaatcttgaagcctttgaaatgttagacttggaaaaacaaaaacaaaatatttacagcgccattcatggagattcatgcctaatgtcccaaagtaggagggagaggctggaacagtgcaagttagaggccagtctgggctacatagtcagatctagcttcagagaagcaaaacagaccaacaagtaaaacaaaacacatcactacttttcagatcctagagaagactctgccattgaatttgtgattttcttattctattcatttctatttacatttggttagggttacccttcatggattatgataaatacagtttacttccagaatgtatgatttgatgggatcataaagaaaattgcacaagaagcagatcagaagagtctagaagaatcataaccacttatgaatccaaccttcatcagcatttaggatatgtgcattttgaatgcttcttttcttcccagatgaattgctttggcattcccatatgcatatgtaacatccatctggttagccctcaaaactgtatgctggtttttttttttttaatcatttaggcatttctgccacaaatgctagtcttaatctaggatttgagttaactttttaaataccatatcaaacattaacctaggtagtctcctaacattttctaacttattataatctgaaagcatgtttttctttcaaaatgtatttcagagttatagaataagaattttgagtgataaatttcttatttttcaaagcatgtgaaactattaaataaaatatttaaatttagaggagtgagtatcttctatatgttcctagaagcagggcctcactatgtagagcgaggtaaagcagcatagtgtcattgcactaatgttgtgctccatgttcagtcactctgagctccaagtagtgcctcatgtggacatcatctagtgagagtattacatttcatcacggtaggatgaagtttcacagtaactgcctctaagatgttcgcagcagtacacttacaagtcactctctgacttagtagtagtgaggtcagaaaagaagcagactttatgagaagaataaaagttcctcatactcaaggaatgttgtggttttgcaattagaaaaaatacaaaaattggagactgaggtaggaatagatttaactacagaatatactgtcatgaggaatgtcatcttctttgaacaaaatacagtacaacaggtaaaatatttactctacttctaaagatggacagtatgtagtttccagaacaagtacttgctgtattcagactgctatattagcaaagaaggcagattataaaacagtaaactaaggaaagcaaatgtagacactaacaaacataaactatatttatttactttttaaaaaagcattcctggtgaagccctgacagggggttggaagttgaaaacacaccaatttctgttataggccagacaacataatagaattttaatatgactaaactcagctgtctggctccttataatgctatagccaaaggtaacctgcttgtagtgcattttcctttatgatcccagcaagtcacacattctggaagtaaatgttgtatttaccataatctgtgaaaggaaaaaggctgagctaaaaatacaaaattgaacaaatgtgaaacactactgctcaagttttataattgttccataaatgagactcaggcatctgtgtggcagagatacttttctgtatcattgaaagagctggctgagcttcagatgggttggcaggagcatcaagactcatgatgtcctgtgaaatatgttttgtgctgaccaagcaaataatagtaggctgtttggaggctcttacatttgaaaacacagttgcctggtaagtgaatacctttaatatgagaatcaggtagaattgtctgcatagagccaatcgttggagtggatattaaaggatagagttgctctgggaaatctgtattctcaaacaagctacagaagaaagatgggagtgcagaaagcaggaagtagagagcagaagtgagctgtgggtgacatcatgtggaagagcacatcgtggaacagtgaactctgttcagcctgaatgtggaacaaccacagggaagcagataggacttagagcctaggcggacctccgaggtgggtgggaactacttattcctctcacttctgtaattgtgtaattcttaattgtgactaacacaattaggttttgtttagcatagtagatgcagttaaagctatgagggttctattttttaaatgtatgtatacttgtattctgtttttttaatcagtatgaaaaacagtatttaatataaattctttttttaaaattttccagattttttatttcttgaaataggaaagcattgagtccctactctttcccagttctgtaaaacatgcaacatttcttgtctaatcgtaagagaacacagagaatcctcctgtgctcatcccatagctgaggtatgtgggactgagtaatttgcccaggcttaaactgccaaggctgctgctacatactgttaatttagaattgggtctggctagcatcaaaaccccaccagttcatgacactttctcaggttatcttacaatacagtcattgcaattaatgaattattttaaataattacacactaggaacatcctatacataaaactgtgaattcccccaaaagaaaattcccaaatgctagtcaagctttctaccagaatatttttaattttttaattaaaaattctatttttttgtttattatttttaatattatttttggtaaattcatgcctgtatacaacagaactcagttatattcacacccatttccctcatccaactcttcctaaaccctcaacctagcccccctctctacttcctttccttttttaaaatgtgtttaaattacatatttagtccatttatgctgcccatatattgtaggcatggggccatctactacagtaaggagaatctaccaggggccacacattcaaaaaagaaagaatgattccccctccccggcagttatcaactgtcaacacctccaccgtaagggatggggcctagagaggatgttcccatctatgccacaatgttagctgcatggtctcatgagggtaacaacagttggtattggttcatgagttcaatagccaaaccaagtctagaaatctgtacttcacaacattccttcctatcactaaattcttacagtctttttatcgtcttctccataaagctccctgagacttgggatgtagcgtaagtaagaaaaaatgtgccacttagaactgaacccctgtgtcttatttccaccactttagctaggtaatgcatctccgcactgatgcagttcactgcacagagatgtctccagccgagactgagggttgccttggtttatgggtatagacataaatatttaaaaggcagcttgacaatataaccactcaacaccaataacaacagtaggttctaacctaggatccgtgacctcctcagtcactgtcacgggaatttagacctagattgcaatgccagcctagaaatcccttgtatggatcagacttcaaattccatcaaaatgcacctggctatctagaacagtaatgctactgttgcaccagtggtgacatcttgcctggtaggtcagtattgtaccttgtagagtccagcactagtcagacacctccccccgcccccagtacccacatgctacatctgccactattgaaggtagcagtagacagggagcttcctggttggtttttgattgatttttctatgtcctataggtaatgtgtgtgtgacataatagcactagttctctcgtccttattcttattccggatttggtttggtttggttttttgttttgttttagacaaggccagaatggcctcagattcattttgtgaccaaaaggctgaacttggtttcctgatctttccacacccactttgatgtgctaggattacaggcatgtacaatcatagctggctctaagggtacttaaaaacaaaagtatgtctgtaaaaaatagagtacaaaaataataagcacagctgtgttccagatcggaacattcaaaacttgcacagtaaaggaaagattcttgttataatctcaatgggaaacgccattttcccctcccttattatccattgtgtggtatgtctgtctgctggttcattcctcactggctgaattaaattggaaaatttgcttttcactgaaagcaaactggagaatttgattggatcactaagccacactctgtggttccctgaagagcctcacgcccttgtactcacgcccttagattctgtagattgttgctgtttactctcttaaagaatgaactccttttacagtctagaaagtctttttacgattcttctcctccaaggccaaaggccccttgactctctatgacattggatacttcatcttcaatttataattcatagccacatatctaaatatattcttccataaagtattatctttgctgagctctttgctaaccttaggtacaaaataaagcagttcatcagccatgcgtattcagaagaggagagtgttggtttggtaaatgtggttatttaaagtgatagtgaggtgataggatgtgttaataacagttgttaggaaccactagattagattagtacttgaactaagaaaggtgactgtcctattcatctatctgatgtccctctgatacccccttccccatgtgctacatggctacatggcagagatggttcaacagtaaagaacgctaagtgctcttccaaaagacctggctttgaatctcagcactcacatgatggctcaaatcctctgccttctgtggacactacatgcatgtggtccactgacataaatacaagcagaacacattatacacataaaataaaaataagtaaatatttaagaacatacagaggagtaagaagggaagataattcaaggaaatgattccttgagatttctatgtgtttgctttcatgaaagatagttgcgctcaggtgactactcggctagccttgagctcgctgtgcaacatcaacaggattggtactataacaaaacccaatggctgcacaacccacagagatgggattgtagtttctaaatgtttacaatgctcttttattaagatttttgactcaaaggtagaagtaaacagtaatgcgctctctcgctcgctctctctctctctctctctctctctctctctctctgttcttttgacatgataatttccaagagcttctatatggtcattaaaaaataaagtacttgtacaaagtttgtcttcataagcctttttgagtgtgtcttcaatgaatatcaataaggatgtcttcattagtggaccaaacctatgaaaatgattgggttcggtgtttcataaacacaacactatatatatatatatatatgtgtgtatatatatatatctgaatgaaaatggatttatcatgccttaaatgtgaaatgcagattcgagaaccacatgcatgtagtgtccatcgaaggcagaggatttgagccatcatgtgagtgctgagattcaaagccagattgaagaagcatgcatataactgtttgcctttcattagaaggaaattgctctgattattatcctcagctcataaggtggaagttgtgtagtactgtatcacttgaaatccctttttgtgagtacccatttataagcctgtaaaaatgccaagtagatcattgactgacggggctcacacacaggtcctgctttctttcactaggagcggtgggatagtgctactggagaggctttgagagaataacatatcagactgaagatcagcctgaaggtgtcagtgagacctatatgaagttaaaataaagtttccattaaagaaacactgcagcttagcacctgcagagctaccaaaaacctatgctgctttatctgtgaaagatcagcagcaaggcccctcagtttatgacggggatttggtttcctcaggaatggactcctcatgcgtcctaagtgcatgaattatatccatacagtagaatcagcataacaagtggtacgtaccccagccataatcaattgagtttattagcaataggacttctgggctgttgcattgttcattatttagattttaccagaaatagtctttgccttcatttacccaatacagagtacaagaaattgcttttgctgactgatctaaaaatattagaccaagagtaaatttaagaagtgcattttacccaatgtcttgctttctcctatctttaaccagtagaaatgtggggctgtgaataattgaagctagctctatccagcgttagaaccatacatgaattttaataaaagtcaagggcagtataataccctgctggctgctgacaaagcaattcacttttatatcttgggttagaataacattctgtccttcctcattcttgagatacttggttttgttaaaatgactacctttatttaaattaagaacacattcagaatacttttaataatatatgatttcattcataaggaggtccttcatttattttaccataatttttctcaaccagagttttcaatgtttttgctaataagaaaaaaagcaatacttattttggcccaaccaaccaaattgttcttattattgattatctaaaacaaaacaaagcaaaaaccaaaaaattccaaacaagcctagtaacctgtcaacaggggctagttagtgaaaactgcctgagtaaacactgttgtgtgatttcatagataaagtgcattctagctggaacctatgtagaggtaaccgcctaatgtgacagagccctgcatccacacgtatatagattgttaatgtgtgttaagtgcatcacccatctccattagctgatgagattttaatttcctacaaagctaaatctatagtttttttaggtttttatttcacctgggtagaatgtcctaaagcctgagtccattctgtaaacccagtgtcaataaatatgatcacagtggctagagtagtgtggttccagaaggattggccaaaaccccggagcctctgcaccctctgagcatggcctgaatcttgttcctagtgttttggggtttttttttgtttgtttggttggttttttggggttttttttgtttttaatttttgggttttttgttttttgttttttgttttttgttttttggttttttttttgttttttttttgttttgttttattttgtttggtttttttgtttgtttgtttgtttgtttttttgtttttttgttttggttttttggtgtttcgagacagggtttctctgtgtagccctggctgtcctggaactgactctgtagaccaggctggccaaattagctcattggccaaattagctcatagtctcctgtcacctccttctacactctcttattctgaactccctggtaacgtgaggcaagacaaactattcttgaagtttgccattctttgggtcactaatgaaatttctgtgtagaaatctcaaacacaagctgctcagtgtgtctgaagttatgggcacatagttagggagtcagctcagcatctttcgttcttccccattgctgtgtgttcccaggtaagctactcgggtagctatatgttcatcatctaatccttatccagtttgtagtaacatagcagactttcgtttacacctggaagttttaaattctaaattccattaacaagttgttaaatttaagctttacagcttttcctgtgtgctccctacattcacatcaccagtttgaacctgcacagcagtcatagggccagtatcctgggttttgtgtgtgcttttcaattcttttcccttgtatatctttttcatgagtaggatggtaggaaaatcatccagtaagtatggagggagcatgttacaggattttattattgatttttgatggtatttggtgtggtttatgtttattttatttatttatttatttatttatttatttatcatttatttgaggaaagactgtctctagtggttgattgagttggtagaatttggggctctgaagtttatgggtgtattgactcctgcagatacacaagtattatatacactgtggcctataagccacagcataaaacttattgttctggatagtcagcttgactacaaaacattcaaaacatccttgcagttttatactaaaaggaattgaggtagcttcttaaaaattgtttagactgattttatttatatgtgtgagtattttcacttgcaaatgtatctgtttatcacatgcatctcttgtacccacacaggtcaaaagagagtataggatcccttgcaattggaggtatagctggctttgagccaccgaatgggtaccaggtctgagcctgtgtcttctgtataagtagcaggtggttttgaccgttgagtcactttcagcctcctaaagcagttgcttgtagcacagacctttaaatctacccctgacttctcaggtctcatgatgaaatgaaccaaactgaaaagactagatctaagtctaactaggaagggtaagtggggactccaggtgacatcattcgtcctttccctacttcctgctgaatctcactgctcacacagcacacatctgaaaaggaagctgcactgtgcaacctacatgaggcgtgcaggcctaacacagagcattctaagcaggagaaatactgtaagtggtgctggaagagagtgagcactctagcccagcagccacttgtatcctaagctttaggtttgaatcctattaactttattcctaagagttgagttgagtaaaagaagcccagagtgacagtgagtcagagggggtttacacagcctgctgctgctaaagtagaactgtaggctggccccagaaaaacttactcatacaataatttttaaatgaaccaaactttgaatagaaaaaaaaaagcacatcttgtttaggaccttagattttgtattatacaatctattaaacaataagtcacttgtagatagtgatagtatgttgtcactgtgacctacacccagtaactggcatacagtagagtgaataaacactgttaggtaagggagagatacatcactctatattaataataataccagttaaataacagtgcacaggatggcaaagatagcatcagctgtgcaggagaaactcagatgaacaggtgtatctacatctgtcttttgggtttgcaaaaataccacctttaacttaagcactttaacttgactaccccttttaataaaggatcctgaaaggatatttttgagcataacattaaaaatgtgctaataaatatttatacctattccccaaaaatgaaatttgttttcccttcagttttatttaatagaatggtcccttggtgatataatttttagcccccatcttcagaatgcatctttagaatgcatcaaattcttaaaggtccacaacttccattttcgacctgctaacatttcagtggcatatccttagctgtagagcattaaagtgtaattcggaatactggagatccagttgttatctactaatctagaacagagaagaataggtgggttttatttgttcaggtacgttgagttgtgtgagaaacctctttaaagctcttgtgtcatggccagaattagtagacatcttatctcctaaaataagaacttccacctttgctatatatttgaaaaaaatatatgccatcatatgtaaattttacccaccatagagatgtaagctatatttggaatgatctctcccatttttaaatataggtagatagatatttaatttttaattctttccaggattttgacaggttccacatatgttaatagaaaataggcttattattgaagcacagagctgcttgtcaccgaagcttcattaacactgttaccgctgcctgacatttatcttataattttctggagctgactgttgtgtctccatggaaacctaaattgcaattgaaacaagtatgataataaaggcatccaccaagattgacagcaagcaaaacctagttacattttgtttatagttccttcagtagctacagctagagacagggaaaatgttctttgggtacttagaattaactctctcctgtcatagtggtacctggctcagcctttatggcaaatttattataacatcttcagcgatgatgttagtaataatgatactgatctttactggaatcatctcaaatcattatgaatactgaatgtaatatttgccctgatcttatttcaacccaagagaaaattttaccccattttgccactattcagtgttgtgcagtccagatcttgcagcttgtgatggcacaggaataatttcttttagggtggagggaacagcaatacttatactaatttttcccttgatggtgagaaacctgagctctcacaagttcatgacttcgtgttgatttggctgttgcctcaaatggagtaagtccagagtgaattaatttaaaattaatttcattttggaaggctccatctggctatgtttaggaaaggcacttacacagatatataaacacatgatcatctgtattcattgtgccagatgtaatgtcaaaaaatgaagaaatgtctcaaaaattatctggggagaatttttatataatgatattctgtctcttagcataagagccattgtgtttgagcacatttagtctcattttaattctatttgtttagggagctaggtgtgatggtatacatttttaagaatatgtaatttaaattccaaaacctattgttgattgaagatattagattatttttattggtcaagattctaaagataatttcttattgaaaagaagaggtataaatttccaaatcagtatgttatatttggtattaagagtgccgactattaagattttacagaatagtactatatgggatagcatgtttttataatcatatgatagaggaatggctttgtatcatggactccaggatacataccataagcattggttgaatggctagcctgttaccctttacaaggccaatagcacacttgaccactgtcccagccagggatctctgccagagttctctcctagtggccctcagcctttggtctcactggcatgcttaggaggaagttctcctagggctcatccccttagtcagcattgcctcaccccctctctcaccctcctggtgcctctcccctcctactcttttcagtctcctggtcatctatacgaaatagcaagagttcgccgtcctttggctttgattgtttaaagtcatagagtcagacttggatctagcatgctgggctggtgcgttcagggagtgggggctgatgggaggcttccttgggagctgtcttatacgggacgctacttacactacagctggaaaaacctggtctgcaggaaaccagacatcatgtttatattgtctctccctcttttgtgtgacatttattttttattgacttatcttattattttaagttagattatacacaggtgaggtaggtaggagtaaaagaagaaatcagtgttcattttgggaagtgggaacccactctgatttcctgcagtatttatcttcatttcataacaatcttaattttcagtttattgatagccaaaataatatcctctcaatcttcctagagagccatttcagttccttgcccccagtggacaggcacattcagcagtcaggtatgagcacgtaaaacaaactgggaagacattcattctcaatgggcagcctggagaattttgaccctgtaaggtggaagcagtcggctgtcaccggagggtgtgtcagggtgaggctgcactttgggaagatgagggcctctgtatctcttctttaaaatgattgtttccctggtgccatttctaaaccttcgtcagaaatacctatcagcgtagtgaaaatgccttctgctccagccccaaggtccacggaacagtttctgacacagcacagcaggaaaggagattgtcatcaagggcagtgtgcagccggtgctcggcagccttgccggcaagggttattgtgtgttcagtcatcactcaccccccgcatgcctccaaatttccttctttgtaggggttttccagctttctgccttttactagcagtcaaatggagggagataaggtaatcaggttttcctctcacttggtgagtccaaatgctggtactctgtgacctcttctaaagaggagcattccctgagagtcatggctactttttaccttggtaacagatgtatagctttcagatctctgaccaaatacaatccagtataaactctagtggtttagtaaaacatccatgacaagtgtgttgtttctaagttacttttgaaagaaaaaaaatgtcttgtacaccctttaaaaaaaaaactttttattgattctttgtgaatttcacatcatacacaccaatnnnnnnnnnnnnnnnnnnnnnnnnnnnnnnnnnnnnnnnnnnnnnnnnnnnnnnnnnnnnnnnnnnnnnnnnnnnnnnnnnnnnnnnnnnnnnnnnnnnnnnnnnnnnnnnnnnnnnnnnnnnnnnnnnnnnnnnnnnnnnnnnnnnnnnnnnnnnnnnnnnnnnnnnnnnnnnnnnnnnnnnnnnnnnnnnnnnnnnnnnnntatcacagtgtgtcacacagtgcagccttttgtccacacacctttgcttgcaaatgttccctacagtgagtcattgatctggttccaggcctctcgctcctgctataccatcaatactggatcctcacagggactcccctcagatgtcctgttgctgtcctgcttcaaggagatccagcagatcctaagctgctttcactctgcttgctccaccccttcatttgtccacgtagatgaggttcccatagaccaaactcaaagccctggatctgggcctgtgtagtagcttagctgacttggtcacccttgcagctctctggcactcataccaccatctccagctctctagcactgcctgatagctcactcagtgccccagctggcaaaaggcaaggccagctctctgtctctcatggccttggggccatctcacccccaccctctccaccaaggccagctatactgtgctgcccaggtgaggtgtggggccagcattctagagtgctgcagcagtaagggtcaggactagctctgcatagcccttggacagcaacattgtcctaggtggcagcccagtgcagggatgtccccatggcctttggtggtaatatgagccatggatattggcacagaccccagctgctgcatggccatacactgagacacggcctttagtggcagcacaggccaggacttctcgatgagctcaggtggcaggacaggcttctcagctcaggctatttctctccactcttctgtgtccagctccacctctcgtcacagtgctcaaacccatcaactctctctctcccagctctccaccactctgagtggctcctgctctgggtgggccatgcagcaggcgggcctctgggtgccttccatctatcctatatactcttacgacatttctttccccctcattttttttattagatattttcttcatttacatttcaaatgctatcacctttcctagtttcccctcagaaaatcccttataccctccccctccccctgcttcccaacccacccactcccacttcctggacatggcattctgctatactggggcatataaagtttgcaataccaaggggcctctcttcccagtgatggctgactaggccatcctctgctacatatgcagctagagtcacgaggtctggtggtactggttagttcatattgctgttcctcctagagttgctgaccccgtcagctccttgggtgctttctctagttcctttattgggatccttccctcattttttgtaaaaatcttatggacaagcaatattacatgtacgtgtacataaagtaaccttgaattttccttcagaataacacaagctaatttacttaaaatttgatgatcgaaaaggaatttttatctccttcagatattttgagtattatttattccagctaatcttccatgaagtttttggttgctgatatggtgccatttcaccccagagaatgtaggcccttattttataattgacatgcctgtaattcaaaaggttctgctctacatggtcagagataacagtgtcttccaagtaaatacaggagcatcattatagttacatcttatgtaacaacctagctacagttaggacacatgtgggtagctgtggcttctaaagactctatatggtgtttttgcctggctcctggttaccatgttgccattctgtggagaagataatgttctttttaaatgaccaacattgcccacatggacacgtactgctgaatttcatgcccatcctgtagccttctagaagcaccagacacattgccagtcctctcttcctctgttgccttatgcagctctgtcctggatagctttccatgacaaccaaacagtctcgtcttttgtgcgctctctcttaagtacacgtggtattagacaattattcctaaacccgtgtaaagagtggctttgtcagctgaccgaaatggtgaggtgcagctcattttgttaggaagaatgttgggacatattgagagagatggctctttggtagcacccttggcagttggccactaacagttccatctaagcctgtgttgctccccacagcatacatgacaccttgttaacactctggcctgtatgtatatgccttgagctttggggattaaattagacacaggatgtggaattataccaaagtttcaagcagctggttatactatctaaattatcttttcagtaagtcattctctgcatccaacacactggagatagcatatttttataaacattaatgcaagtatttatatgaatacaagtatttatatttttatagccttttgtagaaattataaccatatattataattgatgtttaaataacattaaattactattgttctctttggtttacagtgggatgaatgaggtacagaggagtgtttgattttccttgagggcacacagttaaattgatgctgagccaaggccagctcctttggcccattatctgcttatggttaggcaactcggctttaatagtattttcaaaacggctccctcagaataatatgtttaagtgagtctcagctctaactagtgttttaaaaggaggaaagaaggtatatttctttctagagctacctaaagaaaattaataaaaatgtgtttatatcgttgccttaaccatagttgagtactcagtagcaatatgtagctactgcctggcatactgcagtgctagtgataggggtatagagatggggatcatttctatcagcacggttgaaccagtgcactcatcccaaaaataaaaacagtaaggtaagaaccaaacaaataaaagggtaagaacaatattattatttattaacaccaagaagatcagctatcttcagacaacagtattcagaggcaggaatttttttttttcatagcagttttggctttgtaagtttgttgctttttttgagataaaggaaattaaatatagaaaacaaatacaggacaaaatacaaaatcaaaaatctgtttctttgcttccagtcttgaaaaggaaacttgaaaatttttagaccttataaaatgttttcctgaagttaataataataatccattgagccacttctattgaatggtactctgctttctcagaggacgcaaggatgggtgtgcatggtctctgttgatctgatttctttttgctaggaaatggagtagggaagtaggtcagtgcagtgctggaagctgcgagtgagccctcaagtggcccttccagtagcggcactttccatcctgactctgaggctcatgccagcagtgtctctgaccgtgtgctcgctgacttatgctcccattccacttggcacctgtcctagagggccaagggcaaaacacaattggtattcagggtcttgttgaagttttcaggcaaggtgcccacagacgtatatgtctgtgtccaaggtttgcaagtggccacagagtctcatgaaacaccactacctcaggatttcgccaaagaagtcgaggtcatagaacaagaagggcagacagttggcttttaaatcttactgtatccatattttatagtgtgattccttacagagattgcattggggaaaggcaccttacttctgtggacctcatttgcttcatttctaaaatgaagatggttccaaagagctattatgatattgtgtgtcagatacttggcaaaggtttctggcaaagggtaggccctctattaatattatttagatttgaatctaaagttgtactatactgtgttccttggaaagtacggaataagaaaagcaagctagtcctagcattccaagtcatgcagactcttttctgacaaagctcttaggagaaggtttggctgagatgggggtatgtgtatctataattctctatgaaagttccttggatacctatggtccctggcaagaacccccaaaagcttaacttaaaacatgattaacacatgatctttggctaactcggaagtctctgtccctacagccacatgagaactgaagtcaccagatttccaaaagaaatattcttcagccaagagaaaagattcagtccaaaggagaagttaaagtgtattaaaacaaagttagcaaaattattatacaccaagatgcagtaataataagagggtcactgtcatatgaatagccaaaataaatgttttcgattgggagtgtttggtggtggttttagtgtatactatatgactacattttcctacagacagaattattgtacactttccaaatgatcatttgcaagatggcagacaaaaagggatataaaaaaggatacgtggcagctactcatccgagtgactttctagaagtagagaagaaaggctctggacagatggtgatcttcttatgtggtaattgagaagatgtgggtttcaaagcagccttaaaggctcataaactgggtggtttgcagcttgtttcccagagatagaggagtggtgtgtgtacatttttccagcattcctgtttttatttgggagtgtgattcaagaaacccagtaagacttgctttggaatttgtctttgatttgttttgagctgtctttactccattcaagccatactgtaccgaatgtttagccacatggtggattagaaatactttgcagtttgggacccaggggcatagatttggattctaactatagttcataatctggtatccttaggaagggaacttatttctcagatgttgccatttgaaaaactactttctcatagggttgtcttaatgattaaaaatgtagccgggcagtgatggcgcatgcctttaatcccagcacttgggaggcagaggcaggcggatttctgagttcgaggccagcctggtctacaaagtgagttccaggacagccagggctacacagagaaaccctgtctcgaaaaaccaagaaaagaaaaaaaaatgtaaatcactgccagatgtggttgttcaccatggaatcctagctcttgttaagcagaagcaagcagatctctgtgagttcaacgtcaggctgttctatatagccagttcaggccagacagccaagtctacaaagtaagactgaaaacacacacacacacacacacacacacacacacacacacacaaacaaaaagaaccaaggccaatttttaaaaaagtaatgtacatagtgtagtattggtatatataagatactattattactaaagatatgagtcatgtttggatttacaccaaaagaatttttaagtaaaaaatagaattatggtgattacttgtggtgagtatgtaaaggaagtgcattcacagtgagaatagcaagacatttatagaacattctaggctatgtgcctctatgaggtgttatctgttgttgccattttatagatgaaggatctgaagctcaaagtagcacagtagaaagctatgatgtccgagtacagagcccatgtgtttgccctttgaatggtaaggggtccaaggtgttaggttggacaaccaactgggagacatgaagtaagcactttctactatagaaaggccaaaggagctctgggcagcttccttccttctttgattccgttagtttctgttatttgggaaaacataaaaggaatgttcatttgtgatgtgagcattagttagtgcttactccagaactcttgtttagatattagacaactgtactgcagtctaactcttgctctatatgagtcattgtccaacttctgctttctgttagcttagacttgtggcaataccttcctcttctcatttagctggttgtcaacagcagtaaccacgagtccttcctgtcccaaaagtgaatcttgccacattctcagcattcaaagtgctatagacatggtatcctctactgcaaagagctgagccacctccaccttgtgccatcacagctccacaggctaaattgtttattgaattctcagtgatgggaaataagataggtgcatgagagcaagataaatggtctaggctaatataaacaagcattgtattatacctgaattgttaaaaaaatttttgcattcaatattttactctgtagagcatttttataacaataagatcgattagtgaatgctgtaaaaatgtatcatgttacttcagtgattaaaaaacaaagtggtcacatggggaggtggtagagatgtagagatcaaagcaacacctactgaagagggtctgacatcattgcctctctgaattaatctgaattgagttttttggggtttttttgttttttggttttttttttttttttcgttctacaagagcttagcttttgggggaggaggtggtctgtgtgaatgtgacagacttttcactatgtcctcaaattcaggaactgccttccaaagctcccagtttttcccatgctaaagagtgcagacatgctttaaggggcgggggcactcaagtctaatgagtttagacctgcagcatctttaaagtgttctttttgtttgtctgtttctggcaacaaaataaggaactctctctgctttagatctttttctagtgcatttttggtatttctctgaggcgacagtgaaatcacacctgcttagtgtttcttctttctgacatgcttaactagtgcagtggtcgcctgcttaaaaggctgcagctcctgggctgctggctttgcacttgtccggctctttgcatttccacagactgatgaagtaaactaagaagggcatcttcagaagcatttagcattctaaagagaagacctggggtatagacagtgtgttagttggggggggnnnnnnnnnnnnnnnnnnnntatcatatcagacttgtgacaagtattctctcccagatttgggtctgggaaatgataggaagacatataaaggcttatgccttattcttattctttgtatccaccccaaatatttactgaagctaggggaagaaaagcagacctttttcttctctttcccaaacgtgtgattgtttagaacttaagtgcaacatctggaagtcagatatacagagaacaatttatggagtgtgaaagatttgaaatattcagtgtcctttagtgggaactcaactttctgtggtgtattttttccccaacacaaagcaggcaattctgagatcacttttgcctctctgaattaagccctttgtgcttgggtcccataaacaatgtgctttttaaaggggagcctcccccccccccccatgctctggcccttttctccagtgcaagcagccaatcagctgcactgagctgcatagctggagcgctttccattctgagcagcaacaacgtactaatttgatgcacacatggatgcctctcgcactctgcaaattcatcaccagcatcttgcattagtcatctgatggactgccaagtgtttcattttctttccatgtgactttattattaccacctctcttccaaaacctctgaaaaagggcggggaatgggggaagagggtgagaaatccagctcagcctttctttctcagggataaccagtgccgagctgataatgctgctgatttgtgatgtgttgatggcagccttgccaattgagacctgcacttaacttgcagctgcctcccaagcctgggttctgagatgcccatgccctgggtgacaggcggccagtcactgccctgtgctccggagtcgatgctgaacagcagcagttgcagtgaaagcatcgcgctgctgctcagaagcaacctaatggtgcctctgctttgttttacttcatcaaatttctacgactcattaggcactttcccctgtgctcctcttcctctttccgcctcctcacccccaacccccactattttttcttcctgtccttcaccctgaagccctaactctggctcctggttccgtttttgacagtaacggcacagccaacaagatgaacggagctttggatcattcagaccagccagacccagatgccattaagatgtttgtcggacagatccctaggtcctggtcggaaaaggagctgaaagaactttttgagccttatggagctgtctaccagatcaacgtcctccgggaccggagtcagaaccctccccagagtaaaggtacaaaaagcatgtggcgcatggggtagggtcactcaggcgtcagggtgggcttagtgactgcggtgggcacccctgagctgcctagatatcttggaaccatcagtacgcagggcaggagggagggaggaagggagggcagcaaggctgagagcagctggtgctgccggccctggtgttctggctgtgcctcagggctcctcccagaattcccgcctgctgggacaggtgggactcaagaaggagggcaggaaagctgcccagctttttatggtctcctgattgctcctatgaggtcacgttctaagcaatgtgatctctgggcggagttggtgcttctttaaggaacagtatttcttagtcttgtacttcaggagctaactctttcaatgctaccttttcatgacttctcatgtaatcacaagtatattacccttttctatagcctgtagagaccttgaaatgacctgcaaaacagtgcagtgccactggtgggatagagaaagggttcaccttgaggacagatgcccattctttgaggcagcagagatcattaagagaactgtgcctgctggaacaagggttagtgccctggtggcataggtagttaacacatcttcagaatagtcaaggcttgcacccttatcagaggtaagatcaaagggcaaagtttgatgcttgttactgcctccattttaagataatggggattgggtggaggttgtaattattgaaatagaggccaagaatttggttgatgcttctgtgtttttaagtcctacattgtcattgtcggctctgtatagactcctactgctaccacttggtttctgttgctattttaacgtttttgctttagtgacttcgttcttttttcatctctcttctcaggcctctttcctaaggatatcacagttgctttttctctgggctttactatttctgtccagcttgttggtttatttttatgtgcatcttgtaagagggagcccctcttctagcttgtgtgtgctatttagttaggcacacgaaccttacctttcactttttctgagccttttaaaaataaaagaataagaaaagtttaaggctaatattctgtaattctgtgaaatgctgagctatctcctgttctctatggtactgagggttaatgggctttgggaagctttttaaaggaatttaaaagcccaaagacttgtaaaggtagacaaacccaccttcacattttgttaataaagtagtctccccccgaacataacctttaacactatggctgttttaaaaagactggaatgttgtacctacaaagaataaaattagataagtaggctctaacatctaaaatcagtaaaatgtaaaaccacagaaatcagaattatgttagaaacctttgtgaatatttacatgttttccacacaaagaaattaggagtacactgtaatatttccatactatcctacataagagagacagcataatgcatggttctggactaattagtttttaaataagtccttttcctttacctaaagtagtacccaaaagaagatagttacagcagcaggcaatctgcatcctcacctaggaaaatggaacactgatattggctttattggcctttttcaaaaggctgagtggcaaaatacccagaagtcaactgtggctatgattccagattactcgctttatatcttctgagtatgtgtatcttacattggtccctagacctttctcccaggcaagtatattttatgtatggcttggttctgtgctcctttgagcaatacctttatccagacgacatttgagactatatatttcctcaacttctgttcactggtttttctatgtaattaagaaggtcaagcttttgaagagggagagaaactaaatacagggactctggggtgcatgtgcactacatcagaccctctactgagtgctttatatatcttccatttagcttttaccaaaagtttgaaggtcgatagtatcagtcacagtttacagatgagaatgcccaggccgataaaagttaggaaatggagcccggttttcccagctagtagaaactctctggacactgttcaccagtcttccgaagcttaactgttttgtctctcagtgagatgagattaaaaagaagcaaaagcatcatctgcttcatttcatggcttcattttcatagctaagtgtcctcaagtaaaaagactgggtatctccctttaagagcactaatggtttcatttctgcctttgtgtttagtttttgtactcatgggtttagattgtacatccctccaactcatagtatcatggaataggagttagagatgaaatcattcaaatcttacctttggaaatacaggtcagtttctattcctgtgaattgaagtctcagattaaatattgcttgagatataggggctgtcagccaaggcttgaaagggtttctgttatacagacatctctgttgtgatgggacttgggccctgtaatgacattgttctcagaggcaaacagttcttaggtacttacatatagaaaacaatagctaccattttctttgcatcagtattcgtgtataccacatataattttacctgtttatatgtaaaactgaatcccaaatttacattgattttgactctgtcagcagagtacagttaccatgtttacacagtattgatgccagatcctcaaaaactagaattactggaggctttgtttaaatgtggtttaaattacctaagcaaggcttttggatggccttgattcattgcctcattggccttgatggttccaaggaaagaggcaaaagttacactactctttaatccaggtgagttagagttttcttttctttgcatcctatgttctctttaatcttgaggagtaaaagctttaccctgttttcattctgtaagagttgaagtgtaagctgtctgtttcttcttcttttttccctcttcctcctcctctgtctcctcttctccttcttcctcctcttcccccttctcttcctcttcttcttcctctttcttacagatgcattattcaagcagattcagaaactaggaactctaagtagactgtcctacccttttaagagttaagaggaacgttttaaaacccccattttatttgtgtacatgtttgtgtacagacatgtgagaacacccctgtggagacctggggatgaccttaggtgtcaggccttgccttccaccttgtttgatctctttcttctttgttccagtgtgtgccagacacactttggaagccgccttttggaggctgtctttcctctcatctctatgtaggaatgttccagttacaaatgtgtgctactacacttggctttccatggatctgcagagctgaactcagattctcatatttgtatagcaagtggtttactcactgaaccatctcctcagcccaagaggagcgtattttattccatggttatctgccacttctacagatgataagaaatagtacagagtgggtaaaacatggcctgtaaaaccagacatgcataaatccacttcctggctctgattctctttaggtatttcactgggcagttctgttagtcatatcaaaataatggggacagtcctcatagaatgctgagttagtgatagccatgctggaatacggtaggaacctgatataagagattattattctaattgttaatctttatcataactgtcttttaaaaacttaaaatctaagcaaaacaataaagtaaacacatggatcactacaataaaagaatgagataatagtaactagaaaagaagatatacatactgaaattagagttcacagaagaaagaaatgaattttatttttatgagatacaggaaaaggaagcatcttaaacaaaatttaaaaccactaatggaattttagtaaatagagttgatattaaatgttacaagtggatggacttaatttagcataatttagagagggagagagatggatagaggggcagagcatagtctgaaatgaaatagaaaaaaggaaaatcacaaagctaagaatttataggatagggccaggttttagagcgtctttgtagtagcatttaaaaaaaaataagatttctcttttagataaagggagatctggaaatgttacttaagcaaaaagcaacaatgaagagagttccatgtgcggtgcgcagagaaggggaaggagtgattggctgggcacagtcagcagtgggaagaaggaactaggaaataaattagagcagtggggagggagaagccaaggtgtgtgtggaagaaatagggaagaaattcacaatggtggcagcagtgataaggagagaattttggaaccacaaaaactgttttaattttgaggtgccccagaagggtcaagaagaatgagggccaagaaaatacattgagtgttgtgctggtaaggactaagcagcatttcaaaagcaaggtggcagtttaagcaaagaggagttgagagtgtatgcatggggcatgagtatagatttccttaccgacgctctgaacatgaaagaacactgtatacatgcagtgctgatgttactgctactgcagttcttgaaaagacagaacaaagatggtcatagaaatacaaaccccacctgagtcagggctcttgaagagagagaaggaaaagctgaggaacatcaggagaagggttaaagagacttaatttgagacagcagtacagttaggaggaagtaacatttagaaaatgtcagcatagaggaagaagtacaatattcagtagataatacttagtagcgatgcctctatggttttgtagtaaatagcaaatctctgagccataaattgggggtttatgaagaatagatttattggtttggaaaactgaacagaagaactattgaaacgcagaaaggaccctgatacactcagattgtgtttcaatctgtgccctaagaggctgtgattctggaaacaaggaaagataacatgttagtggtctggaaacaggcagagacttggaatcacagagaacctgaggatggggtgggggggctaacctgatgtggtaaaggaccaaaagggtagcagatacgttggaatctgctctccaaggtctaaagtatagagatggtgatgctgaaagattatacctttgtcttggagaacaaggcagagtctcacgctggaagaagtggaagctggagacactgtgttcaaggccaagcgtgggacttgtaactactgctaacgaaatgtgtggggtggaccaaaatcaaaatggcctctgaagaaacatgctctgtaatgaacgctgtgtctgtttttctaaattgaaattaatattctgattttacaggaatgaaaaataagtgattaaattaaaataacttaacctttgagactgtgagtcaggaacagaaccacagtcccaatctactgcattgctgatcacattttactgtatcttccttaatgacgtctaagcctaagaaataaaaaagtggaagtgatttgtgttgactctccatatagtccaggccagaaaaacaaaacttgccttttttcgtgaagtatgttaggagagcatcagtagtgcagctgtgcacctctgcactgcgcagagctggggcttctgggtgagacacaagctaaattcatatctccattggccagagatcttaactccaagtttcaaaagagcaccttccatgatacttaggacactgactgctacagtatcttcttgctttgagtcaggctgctgtttgggtgactgggagactggccccattgatcttaggatgtgatggcaaggcctttctttccatctcatagacctcactcactgtttgagagttatccattaatgcaatctagctttggcctgctctgtctttattcagtaccgtaggtaagtttcttgagaatgaggctctatggccagcgagtgggcagtgacaggaagacaccaaggcctgactgttataatttcagaactaggcagagtgacatctcacagtccagaggatttttcttgttctggtagaatgagcatgggccctagaaacaggagacttacagctggtacttacgactatgactgtgagacagctcagaaagaatgaacctccgttctttatccacatgatagaggtaatacctaccattgggagaggtcttacacattcaataaataacaagtatgaatattgttagtatagtacaatggcacttgatcatcttacaagctatattcttctcagaaaatgttacaggtttataaagaatacccttgaccagtttatggtatggttctaggggtacagagggtgcagtgaggtgctaaaatatgattctacattttgtgccattcctttcttcctaaaacctctatcagacccttaagtaatacacatggtgctaggactacaggtatgtgtcaccacatctaactgtcctacatttcttaaaagataagactgcacactagatcatgcgggactgtcctatttttagtggtcctcaggaagaattattttatcctaacagaagtctctgtattacttaccatcatacttcttcattattaactgactgaggaccagcagggtaaatataaaacacaatcagaatttctatgtacgtgtacgcaggaatcctaatcctgccttgtgaaagatgggtactagttacatcatatggtatgttaaaaagaatcattagaggtctagaaaaatgccttaatgagggcaaagtgcttgctatgagtgtgtgaagagcatagttcaagtttccaggacctttgtaaagctggatatggtagtgtgcatctgtaatcccagtgcccagagacagaagacttcttccaaaactcatgctgtactcacatacatgaacaggaaccagtatacatgtgtacatacattacaccacataaaaataaatgaaagaattaacaatatagatttttatcaaatggagttttaaataccacccattggatgatttgaggtaaaggactgagaaatgcaaaataattttctttacgttctcataagaaggaatcctttctaatggctcgtactgtggagagggtggctgagatatgtttgatttctgtaacttcgatcaaaggagagtttctacactagcaaataatttttaccatgggtacatttgatctttatctctggagagaaaagaagaagaaagggaatgagagagatacagaacacacagactgccagtatcaaagaagacaagaaattactcaggactgcctctgactattttgttttgcttctcctctgtctggaacattaagccttcagcaaggccccagttgtcttgtccctggtagatttaggtttctggaattacagcttccaaagacttaaagaatacagactctggacagaagaggaaagcttgtttttgtagaaatctcacatgagagaaaaccgagggctcatgactcgtgtctctctgaatgcctccagcacatattgctggctgtatgtagactgacatctagacagcctcgctgttcgcctttgccactttgtgttgataccttgcctgctgagaagtcacattcgcctttcagtgacaccaatgagattctctgtggtagagaagctgtagcaccattacacaattgtgccacttaaatgaccaggctgggggacattatgaaaccagttctttggaaataagcagtccagcttcctctccagaaagatgccctccatacagcaatcccgttacttatttggaagaattgccttcagcattgccagagagctgtcacggtgtgccttacttcccaactttggatccagtgatcctaaaaattcacacattctgactaaaaggcttactttcttctatcttcaaactttatttctgatgaaagttttaaattgattttaaaagtctttgaaatgtgcatattaaaaacaatgtcacataccttttgaaagcacctgttatccttcataactctacccacggtgagatgtacaattatgctagtgcagttaataccactttttattcttacatatattacccaaagtgctaagaacatttatttagacttaaggtctcagattataggtctttcatcctaattttagtgattctagaaccacctagtcttacctttattttccaatattggttaacccaaacttttttacaagacatgtttttcctccagttacaagtaagcatcctgaaggttccactgtgagtatgcatagaacaatcattatgatcatcaaaacttttgaaaactaccaagtaattaggtaactagacaaacagaaaagtagaaatcaacctaaaataatattgtcttaaaattagttgtttgggtagcaaaaatgatagatgctagtatattggcttttttgaaaattggttaaggaaattgaaagtattttgacccatattgtaaaactctgtagaaaattaactttaggagtctcagtgatactttagggttaacattagaaacactctgacagcaaactagaacagttagacatattaaagaactgggcctcgggtcaactttgatgagtatatccatagagagaggagcacagaaggcacatgggagatgatacactatggtgggccgcattctccaggcttccttttatctgagttgggtggtcagctacatggaagtgggatgcaaagtagcaggtttccctccacagagctgatcggtgagtggggacaaaccacagtggtgaaacacgatcaaggtagatggggatagcagtccagacagcgcagaagttgatagctaagatcagtattttttcactctatttgtaaatgactcagagaagtttctactaatccactattcacactctggcatgaacacaaattagagaaactcataatataaacttcaggcagtgattatgttgaagaataaaggaacatgatttctctattcctattaaaaatcataagctggaatcagaggacagaagtaaagggttacaatggaatgttctgtgatgatcgccctcagctctcctggagtctcagcattataaagcattgtcaggtgaattataccttaggtttctgaagcagattctgtaacccagcctgccaagcgaccaagatgtgtctcctacaggatccagaaagtacagctggtttttaccgtctctctccattttaacttcgttttaaagtacagatgctactataattcaatggagatcatatttatagacatatagaaagttatatgggtattataggcattgaggtgtgtaggaaaaaaggtatctgacaagataatgagccaaactgctccccagttgctcagtgttacaagtgattccagaagcagaagcaagctggatggagcaggtagcttaataactttttaccatgcaaagcctttttgctgctatctaggacaccatggccagtattagcaagtattattgaagttacatcaagtagatggaggcattccaaagaggagcagcgtgaatcacgaagtctggaaggtggacaacatggaaaggtctagcaggttaacttcaaaagactgagcagtaagccagaagggtgaaaagagggaaaacccacagcaaggaattaagacgaggggctgtgttcccaaaaataaaaaaaaaaaaaaaggttctgattgaagttttgaagatcctaaagtatggagtgaggctctgtatagataagctctttgaattaatactaaaccatgggattctggtgcttatacttgaaatgttggaacatcaggtaaagtacagagtataagccaaatttgtatatagaagtggtaaacatagagcaccgaataaaagttaagaaggcaagggtgcagcagctaactccgctgttctcaagagtggaccttgcccatctgtcttaaaagaactgatgcaaaaccctctataatgatgatttgaaggttgagggatcatgggacgggaaataggtagcccagactcatgtggcagtcagtatcttttggtggcctgctggtcagaaaatattatgcttatgtgctccagagttcagtgcctttcctgtgatagagataaagtgaaagagtaagggagctgaggtcatgtgacaggaagtgtggcgtttcccttttcagtatcatacctacatagcccccttcctctttttcttcatttttagtgttccttctttcatctcgctgtggaatttagaacaagatcagttaaagtctttctagagtgtctttctgaaggttttccaaattaatacaaggagatggggcctggtgcagcttttacactggcataatgagtcagccccaatgcatcaaacaggccttctgctgcattatttccctgaggaaacatgaacaaacgtctgtttatccagataggtcactggtaacagactggcaaaattcttccacccaatctatgttaaggtttcttctaggagcatgggtgactgtgagcagctgcatcgaaaaaaagtcctcccggcatgggtgacagcaggaagggtgtatcgctggagcttcctgcccagcttgccacttagtggtctcctatcctgtccccttggagagtgttattggctatataaccttgaaatggagccttcctttacatttgtgatgttcctgagtcttgcaagtctccatcttctattttctctccaggaggggagaaaaataactatgcaggccttcaaatctcaccttttcaaatttggtcttacttttttgtttggggcactttctcatatgtacaatgcattttgaccactattatgtcccctgcctgtcccttcctgacagatcccttcttcatgttcaaggcttttcagtttgttttgtgacacactgagtttataacaagaattgtgaccatggacttttaggtattcattgcagcctgattagttcagcagtgcaaagtccttttctactgtaatggtatttagcattggatgctgagaaagaactgccatcccttacctaatagatactacttcacattaagctgacccgtccccttaatcctcagagggagcatgtatatttgtgtgttaaactcttatctattattttaaacttcattataatttgaaattgtgttttttctttgccccttttcccaaatggaagtgaaatcctccctggaagacttctgaggactaaagtatagaatgttgcaagatcattgctcagtggagaacttagcacacattaggaactcgataaggagtagtaaaaaggagaaagagtagaagaaagcagtgagaggaaagcaaaatgactaatacctggctttgtaagctggataagctatgaaatgttcattctggatcttttgggtaggaaaatcttgagtgttttaattatgtacctagaaaatagacacagttgaggtaagtattcttaatacttagaagattgtggtagaatgagtcaagggatgagaatagtcggatatgtcagtgatctcttgagaaggtggcaacacggttggttactcggaatcagagcctctggaggagctcattaaatcccaagcttaagttagtgttccaaattcctgatcccagtgctcttgacattcaagatggcagacccctttaagataatggcatgcccgtttattttagccctgtttcccttgggcatcctgttagtagcatagatcttaggctacatccctctacatattggactgtttaatattatttaatattttctgaggattttcaggtttaaatttttatcatttacatgctgactttatggtttgttcaaaattgacattacaactgaactctcagcaacacgttccttctgaaccacgtttcgttgcttatgccagttacttggttagctgttgcacacctctcttgctgccagctattgtctacttttgaagacagcagttggttttacatctgtgttctctgcagtagaggaggttcactgacttgggtggcaggaatctctaagaactatgtcagtaatgagaagtcatctcactgagaggctagtttgtttcttagccccttctccctacccagaaccaacactgttttcagagacctcgttttgggggaagaaaattcttacaggaaccacaacactgaaaaggaagtaaatgtgttaacagttttgatagatacatttctctaaaacatatattatctaatacatgtatcccttccagaaagatttaaattgtgtttactaggaaaatattatgataaatgctagtaattcggaattggtcctgttgccatatttcacacacacacacacacacacacacgtgtacatgagcatggctgcataagaaagtgaatatggctaatcattctcactttccacaggacttttgaaggttcttctttaaatcagcttagtttggtatttgttttctttatgtctgtgagaatgtttagcaacagaatatgggtttatttaaaagaaaatataacccacatgcttgactgcattgagagtaaccagtgaaagaacaactacattgtgcacaccactgctgccctccaggcacattgtccttctccctgctcctaatagagacagggagcatccagcttcagtgttgacactgagcaacatgcttcagtgggacaaaacaaaactggactttggggggtttgtttatttgtatatattttaaagtcttttgtaaaatactcaataaggaattacattttatagtgaagggccattttgtcctttctctttccgactccttaagtaacttgttcactttggtgatgatactgattaacccaggacaggataaggagatcttttagctcctgctgtttccaaaacatttcccccatactgtaatgaaaggggaggagaggtttgtgggcagttacaatctccatcgatcctgagggaagctgatgtgttttaacagtggccttagagggcaaccatgtgtagctcaattcacacagcctgattaaaacaagtaataaacaaacaaacagcagcacagggttcctgggagaaggtaaactttgactgggagctcttgccacattacctgctgcgtgccctctgtcctactgcagtgtcacttggtcttttactaagcaacccagttaggcagagaaaagtaagtgccatttccaggcccagtccccactcctcgccaaccaggctgctgagtgtgttactctctttgtgaagtggacatctgtcaaacgggagctcaactgtgactagcagttcattttacacaggccatcatacagctgccagatggtgacaggccttagctgttttgtgagtccagtgtgagttgttcaactcgagaagtggaaaacacagtctttccacaagcctatgactcttcagagaaaatgcttctggaagccaagactttgctctaatctgagtgaaggtagaaaaagacttaagaaagggtaatgagtaaatataccacatttaaaaattgcttcttttaggttttagtctttatctaattgtgctttaatctgtgtttggaagcactgcttttaagccagacatgccagactttagagttaagtcccaaggccaataagtttgagatcatttaagaaacaaaaggggagtgccatggcagaacctagttgtctaaccaagctcagtgccatggcagaatgtggttgtctaaccaagctcatcactagtgtgtggacctgccacacatcctcaggactgggatgcttgggagataaggaagagatactggctctggcttccttcaccatgcatcagccaaggagctgcatgagagtgaatagaactgtggtgagctgccctagcaacagtcctgtgctaccgactctccatcacatgtctgcaatgaaaacactgtgctttgagaggactttaaagtcaggaaaccgttaaaccacactgcatcctcctttgccctcaaccactccccctccccccctcaggaaaatggaccctcttttatagaacaggaacctgaaacaaagattaagtggtatgtttgaacagagtttataatcccaggaaaattgctgatctagtcttaaaatctaacacatctttcagagtaatttttaatgttcttgcttcttttacctaaaccatgtgtgtttcttgtgaccttgatttaaccttaatagtgtatatgaagttcaaaaggcagcttagcctccatcttttttgttcctggcattttttttttcaaataaaaagagtcatataatattatactgttaaaaatcaaagctcgatgaacactttgaaaatctttttgagtttttaagacttattttcataaatcttcatacatttcttgttagaagaatgtcttttgtattccaaaaactcctatgcctcgatcagtgtctagaatgagagagacattcaaaattctccgaagactgactgaatgaaatgagctctactttgtggcttagcactagcttacccgtttttagttattctcaccaagcaggcacaagcttctgtacatctgtgcgcttacactgccatccctatgtgatagacagtgtgaggtagcctggaaatacaaggacagcgtggtctaggtccacagcgttttaatactcttttagaaattggagtagagtgtaccattttatagttgaatttgtgtttgtctgtgcttgcacatgcatgtatgtattatagaaaggggaattgtaacattcttttttaaagctgtgaccaaagaaatgatattaacaatagtaatgtacaaatcaaacaaaagaatatcagtactgttctgtgttcattttcgatgtgtgcattaccttgccagatacacactaaaaaccagacttctaatagtagaacttactaggtttcagggaaggctgcacctaacctctactcagcacagctaaaaaggaagttttcacttgggctggcaagatgactcgttggttaagtgtgcttgttggacaaggctgatgatttgagtttgatccccaggacccacatgaaaggggtcggtaaggacagacgtcaccaagttgtccacacacaccttttttttaaaaaagatgtttgctctacccacaatcctgctgtgatgtctgttagcactccaaaatgtacagaactgaggcgcttcttatgtgtggttctatttattgacgcatttataaccctcagttacttgggaccagaaggagcagaccgacagtgcgttttataaattgctgaactgacacttttggtactggggcatatgcgctttactagcttcagtacatctctgtgccaggtttaatttctgtttccccttcgcctaccagatagaacactaactttacataaaaggtatggacttgaatgatggtataactgaaaaagttactggtcatgattgagaacagggtgtgtgaagtaagatcgtaactgccctcagtctctgacctccaacccctccatgatctagaataagctgcttgatttctcctgccttagcttcctaatcaacaaagccgcacggggttgttacacagttaagtaaaggagatcctaatttagagcactcgtggatgccttatgtccaagaagctgtttcttcagctgaggaagcggaagtacaagttagatgagaacagcctttgttcaaagcagtttggcctttcagtaaaagcagtcctcagtgtcatggcagtaattacagcatggatacttaaagactgcttatgtgcctggatagtgccaagggcctactctccactcttattacatattctcacagaaatatctagggcacgttgtgcctccctcgatacctcgtgtgttctgtattatgctgcagttgtgtgtgcacttttattgaactttcagtttcttgctttcagaggccattttatctatttgtcttttatattcatttgttgcttctgtttgtttcttaaggcaaagtcctatatcccagaagggccttgaactcagaatcttcccacttagcctctaaagaaactgcagatgtgcattaccatgcccatgtggttgttttaacccatcagtacatttagaactcaatgcagtgccttcacacagccaattactgtagagagagagagacctatcttatcccagcagctcatctttttcttttcatatttgaaatacagaatccattgtattcctggtttgagtcaactggtaggcacactatggagcatgaaatgatattgtttcaactaaaacaaaagtaagggagtcactttagggtgtcactgtagagtgaagcactttgacatttaaagtgaaaaaaggaagaagaacaacttggtgtgtagtctcaatctcttccacaataggatctgggcctctcagcagtgtgctcacctgaaaccctgccagtcctacagatgtttcctttggctctggtgtgaagaaccatgctgcagtcctcagaacaactctgttctgacagggactgatgtgaaagggaggtgaccacatacaaaaatgacctcgtagtttctacccacttctagtttctgctcactgagtgccaacacatctaccatttttatgaggctgtgaaaaccccactttgtgagtgtgtgcttggagctgtaaggtgatgatgggctttaccttagggtgtgaccctagaagatcctcgaagggcgtgatgaatggaattcttccagacctcagagttgctttcttcctttgttggtttgttccttgtttacctttgagaacgtagattgtgacgcacagaaccaaattattatcagggacaagagaggacagacataaagaacgactagcacgaagttaagataatcgtgcagaatgttgtaatctctagcctgccatgtctccttgcaaatgttagctgttctttggaactagatgatctattagcaaatggctttacatgtgctttacatacatgtctttctactgtccttctgcacagcagtagtcattgtacttccagtcagtgactctcacagtcctggggtatctgtgactcctgctgccttgcgttcagtcttgaattctgctattctgacttactcctgctcattcaggtttcctgtgaccattctgtagtctttacaatggccttttcaaagcaagttttgaaaacatagttgataagcagtatgttttgcatacgtaaaatctaatctaaaatgtggtaagttgtaacatatgtatatacctgtgaattcatcactataatctaaatagtagacatatttcttagcacctgaaagcctcttcaggctatttggaattaccaccaccacatacatacatacaaaacacattaatttgttttctgttgctatattttggtttttatttccccacatttactatatcagtaataatccagcatgtacttattttgagtctggatctttgactagccagtagttcttttgaatcaatccttctttcactttcctttccttgctaagtagcattctattgaatggatatactaaacatatgttctttattgttgccacctgaagctgttgttgttttgtttttgagacagtctcactctggtgcttggctaacctcagactcagagagagctggctgctgaagccccttgagtgctgggattcatagtgcacagcaccgtgtgtattcatttttatctgatctcctctttttgatagcttgagaccatatttttaaagctcttgttcaaacacaagtacctgtaaggcatgtgtgtgtttctcctgacggcatgtcctcaggtagagtaggtttatgttcagcttttaaagaaactaaagtaactgtgccattttacacttctacaagctcttagtgtttcagtctccacattcttatcaacgactggcatagtcttgatttaattctggtgtaggtggagtggcatatgctattgtggctgtacgtttcatttgcattgtgaatagtggtgctaagaatttttcctgttttgtatattatctttgggatgatgtgagttcagaccttttccttattattaattctattggtactttgtttatgtatatactctgtcttcagtaaatgtttgtgtgccccgactgcgccctttgggtctcgtgccatgtgggccattgtagtgattcagaggtgacgtagctgggaagactgtaggttgctttcctccctgggatgctttcctgggaagcattcagctcatttatggtttagagtcctcggggcgctgtctttccagtgcatgctgtcttcagcagtaaaaccttaccttccactctggggagcagccaatgggcaataggataaccctaactgaagcctccaaagccagcttctaacccctggttattgtttggttatctttggccctttgagggagtcttgtcagcacagatgggaaattttcatttaagctatatatgtatatttatacaaagataaatgtttataaaggtgttttgggggaaatagttaatagcatgattccttaggactttttcaaacatcctgactgttactttaccctccctctcttccctaaaacacctcccttgtttcccatgtcctttctcagatccctgcaatgctcaggttttacattgctggagtctgtagcaagccagtcttctacacttacatctggaggcttgggccaggagtctccagtgagagagtgagcatccactgtgtctcctctcgctctgttaccccactcagtattaacttttctacttcagtacaactgcctgaaaagtttatgatttttttcttttatacagctgaagagtatcccatagtatctatgtaccacatttttatgtgtcacatggtaagggttttgtttggttttgtctttaccattttgagacttcttcccactgatttccagtagagttgtaccagtttgcaatcttaccatgctgacagagcttgagttacattgtgtctgggtttccatctcttcttctcttgtatttggagtctattgagcttcttagatcattgagttcacagcattcatcaaatttggtaagacctcagcattccattagtactttgaactgtctctttctctccttggagattccattctcatatatcctgtaacttgctaatttgcttttcttttgatgtttgttgttttagggacttgttttttctgtttgaatttttttaaattttttattaggtatttagctcatttacatttccaatgctataccaaaagtcccccatactcacccacccccactcccctacccacccactccccctttttggccctggcgttcccctgtactggggcatataaagtttgcatgtccaatgggcctctctttccagtgatggccgactaggctatcttttgatacatatgcagctagagtcaagagctccggggtactggttagttcataatgttgttccacctataggtttgcagatccctttagctccttgggtactttctctagctcctccattgggagccctgtgatccatccattagctgactgtgagcatccacttctgtgtttgctaggccccggcatagtctcacaagagacagctacatctgggtcctttcgataaaatcttgctagtgtatgcaatggtgtcagcgtttggatgctgattatggggtggatccctggatatggtagtctctacatagtccatcctttcatctcagctccaaactttgtctctgtaactccttccaagggtgttttgttcccacttctaaggaggggcatagtgtccacacttcagtcttcatttttcttgagtttcatgtgtttaggaaattgtatcttatatcttgggtatcctaggttttgggctaatatccacttatcagtgagtacatattgtgtgagttcctttgtgaatgtgttacctcactcaggatgatgccctccaggtccatccatttggctaggaatttcataaattcattctttttaatagctgagtagtactcccattgtgtagatgtaccacattttctgtatccattcctctgttgaggggcatctgggttctttccagcttctggctattataaataaggctgctatgaacatagtggagcatgtgtccttcttaccagttggggcatcttctggatatatgcccaggagaggtattgctggatcctccggtagtactatgtccaattttctgaggaaccgccagactgatttccagagtggttgtacaagcttgcaatcccaccaacaatggagtagtgttcctctttctccacatcctcgccagcatctgctgtcacctgaatttttgatcttagccattctgactggtgtgaggtggaatctcagggttgttttgatttgcatttccctgatgattaaggatgttgagcatttttttcaggtgcttctctgccattcggtattcctcaggtgagaattctttgttcagttctgagccccattttttaatggggttatttgattttctgaagtccaccttcttgagttctttatatatgttggatattagtcccctatctgatttaggataggtaaagatcctttcccaatctgttggtggtctttttgtcttgttgacggtgtcttttgccttgcagaaactttggagtttcatgaggtcccatttgtcaattctcgatcttacagcacaagccattcctgttctattcaggagtttttcccctgtgcccatatcttcaaggcttttcccagatgcagataattaatgtttttctggacaatacttaatctttctttagtctcattcactgtccttttcatgtcaacatagttgtaatctttaaaattccagtttgagttcttgtaaaaattctattgtcttatttttggaacatcctgaatatataactaatagctacttttgaagtctttgctatttctcacatttttgttttttcaagacaggatttccctgggtagctctggctgacttagaagtcactttgtagaccaaggtggccttgaacttagagatcctcctgccactgcctcctaagtgctgcaattaaaggcgtgtgccaccacacctggcagatttctcacaacttttttgcattctaaagttaagcctttctgtgttctcttctcaatgagctatgaattacaaggttttctaaactggtaagaagctactatttgagcctttaaacctttttattcttttattaatacttcttgagacaaggcctcaaactcaccctcttgcctttgcctcctgagctccacattacaggtctgcaccactgtgcttgtgagcctttggttggttcagtgtttttccttgcctttagtagttctttccatgtagtacattggtcagaactctaacaactagaggggacctgctagggatcctgggactttcagttatgcagcttgatcttctccactgactattcttgaactcgaattctcactacattcagctccaaatcctcaagtttggctatctggagagttccactcagcttccagctccatgtgttgtgacctggtaaattcacagcagtaagctctgttcagtctggagggatggagggttgtccacctgtgccagaatcagaatctcttcctactatgtgtctgctccttggttcttttcttacaagttctgccaatttatccaaaggacccaaagagctgattatggcgcgtgaaccctgggtgacacccttgcctactaacagagcccagtttctttagttgtgttttccaggccattcagaaaccagtttgttttctttaattctccttgtaatactaatttccatttgtccagatctattagctagaattcctgcatgttagctctgctgacatctctccttccttcaggagttaaccatttcctacagcacatctccaacttgaaattaactcctttatccaaactcctggcaagttttatgtatagctaattttatttagcctgtcttaagttgtttattcacatgtctcatttcctttctctgtaaatctcatctgcatgtaggtaaaactaaacaaagtgtatgtagtagtgaagccctacaggtccacctagtgcaatcattccaaatagaaactgggcagttgagtggatattgattaagtcttagcccaatgataatgaatggcttacactaaaagtcagtgggaagatagagttgactctgtaggatgtttggattccactcctttcttccatggatagatctcttctgtgcctcagttttcacataggagtgcccctttccctttgaagaaatgagccttgaaggcagagaattttgtttgctatttttatattccttcaacccagaatcattccattcaataaatgactgtttaatctcagcagtaactctcagtgggaggtattggcaaaagaataatgttttttttttcttctttttttttaaccttccttaatccacaaagtaagcatacccaggaagcagttaggatcactttttcttctaaagagcttttgaaatacggaaagtatccaaagaaggagaaagcctgaaactaaattctgacttccaatcaacacagagtatataatctcattttgaaaaaataatttgaaatgattccatttataggacatacttagataaattggtcacctttttgttactgaggcatacacccaagataatcaacttattttgaaaaaagatttattcttgttcagttttggcaatttcagtctgtgattggttggcactgttggtgtggagaatgtggaagaagtgttatatgtgtattagctacaacacatgatggaaaaccgcatgtgattcatgccaaatgtgaagagaacgaaaagacagcctcatcaaagacatgcacaaatagtgtgatgtcctctctcccattcagcaccacatttaaaggttccactattgtcctgaagtgccacaggctctacagcattaggtagtaaaattcagagacagaaagtaaattaggagtagacagagagggctggaagactgagtttttgtgggagtgtaagagtcagtgagagaacatgcagtgggtctgaaggcaggtggtggttatccttgcacaacactcagtgtaggtagtccctagactgtacccttaaagtggcctttctgtacatgtttcaacaaaagaaaaagaggacattgaaatcctagccatgtctttggaagaattataagtaaatggggtttaaacactaatcatccaaggttggacaatccatttaccctctggctcagtttccttgtcaacaaatgtagcctaatgtattggagtctggcctgctggtctctgaggtgtgactcttactatagtgatagggtctgggatcttcaatgggaggtgatctgtcagtatggtgatgtgcaggaataaaaatcaggatgctgtcttgaaatctgaagccatttaaccccttggaagctggggttagtcttctgcctggccttatttaagtgtgccttcccctggtacatactccatagcttcttctgtaacaaaggttagatttatgtcatagacttacgtcattgaatataagtcattagattgaacttcttttgtaagtgaaaaatgatcatttagttgtttttccatttgtgtttatgtttctgaatccagtggctctctgcaggctggttgtagatgagggaggaaatgtgtaataatgcctgcatataaatacaagctttttggatttatagtctccctctacatcctctgtcagtttcccttcttaggaatctgacaacacagagaatttctctagattgttgcagtttgcccagaagagccaattagtagtgagggactgtcacctgcttttctctagcttttcatcagtgttaaggagccagctgtcccacctgtgcagctgtgcagcccctcgggctggagtcttgtcagactcctactcactaagtagtagttagtcacacctgagatgcggcttctccagtgtaatcgcacccactccagcaagtggtgctgaggaaacctgcctctagaattcctgtctggctttgaccctgtgaggttgggagttggagaaagcaatgcagtcactgggaagcagcagcaactcccctcccttcactctagaagtgattagatgccctcgagaagcacagatgctttagagtcccgggaagccatttctcatgtactagcacccttctgacaaaaatgtgccactatggaactgaccatttgaggggaggctgagctgtcaattgctaccttgtcctagattgtacaagagctgctttccatggaaatcagtactttactctttcacctccctcgtaacctctgccccatgaccagctgtcataacctaacagttgaaaaggagtcaaggaccttgagatggaccaaggcagtatcatcccaccctgtggcctgcagttgtgtggcccaccctctcacagattgctcatcacaaatttaatatgaaatgcaaattagatgtgtgaggcagaaggtttcaaaacttcctgtactttagaatcacctagaggagtttaaaacaaagaccctggcattgaccttcatagattctgatttatttcctctacagaaggactcaggtgcatctgaaggttttcaggtgattctaatttacagctagagttgagcagtaataggtagagaaaggaatgcttggctacaaaagaacagtgttttctggacatactagggcagttgtacatgtagattcacagcagttgagacagcttatacaaggcctgtgccagctcaggccagacaacagtctagtatagaaagggaagttggatacgacattacatgcaactcaggtattattgccagttcataactgctaaagaagagtcagcaatccatggcccctgattggttgactacccacaagtgaaacaactcctaaatgaaacatctaagaagatacagactataaacagcacacacttgatgggggagggagggtccatggggagagggagagagaacaaggaagggaagagaacacaaaatagggtgaggagagagaaaggactagatcttggaggactccattgggagagagtgaatatgatgaaaagcattgtacaaaattctcaaagtactaaaaatgagaaatgggtgcttgactgtatttagtttgatgtggctgtcactacatgttccattcctcttctcacaaaggtattataatcattgatgacttcttttccctaccattgttacctcagttcatatttagtgagaattcaccagctcagtttcacaggcttgaaagcagacagccaccaatcctcagcctttccatggcttccaggaatagctctgtaggagatattcctgtccctggtagaaagaaggaggcttttaagaactattcctctacccccagttactagcaggctgtaatttcttcttggttggaaaacctttaagagctccttcagagagaaagatgccagatataagtctgggtgggggtggagtagggttaatggatgagatagtttcagtattaacagctctgtgtgtgtaggaactcacaccatgtgacgaggacaactcaaaagtttcacagagtcaagataagtgcagcagttatatttaaatgagtacagaggaaaatttcaccacaaactgcgctaactaaaaaggctctctacaacaggagatagatgagttaatggtgagttctgtatgctactgttcctccaattctgtctaagctaatgcagtcatcagccaaggattcctgtttatgtcatgtgtaagagggaggaaatggagtgagtcaaccctggctcctgggtctttttttttagtataatagatgagacctcttggggatcctcagtaggtttcactgtaggaaaataatcgtgtagtcaactagaagaatgtaaactttccagacgttaattttctgaaatgttttgttaatggggtttattcccaacaaattctaaaacatgtctttcatttagaactagacaaagagtgagtcttcagaagctttggaggaacactaaccatctcgcttataagcaagaactaagattctcacaggtcacatagtgctcatagctaggaatctcatgtatcaggacttaatttcatgaactcttggtcttaaaatattcactttggtactttttttgttttataattttcatttgggttttttgttttgtttactaagttgttagaaataaaattttattgggtttccatttttaggggaaaagtagatttggaaaatttagttttgctcaataaccaaaatacaggtttgtgagtgtacattgatctcacccagtagaagaaatcagtcctttgtctgccagtgtcttaaaacatgtaggaccaaaatattaccactgaatgttaagaatagtaaagcaaactacatacagagaagataacccggtctttaagaagactcctaataggctcaccattattattagtaaagatcagtgcatgttaatatatcagctattttattgtaacagcaggtaataaattgtaacagacatttaggagtttctcaatgtgtgaattgagcttctgaatatggaagaaggagacagtggtctcagacaatagagaactcaactctatttttaagtgctgtctgtttcatgggaagtagctaacctctataatttctaaatccatctggattatcaagatacactgattgctctttgataaactatagtctcaaaggcatggaagtaaacttgtacttgactagcccatactcaggattaaatttttaatgagccttttttaagcatcctatggtattagtgccagttcattataataggaataatagagccattccttgcacaggtaagcttttgaagtacccttttagaaacagagatctatggtatcattgtcagtattcaactgtgaactcaagctcacatcttatctgcttctagatgccacagtatttctttctgttaaaacaaactaatgccacagagggtgcttttactgtccttttcctagaatatcccctaaagtgcttcctgggggtagtcattgactttggctcatttttttgtgcagtagatagcagaaacacacgagccgtcatggagaagactttgtgtacagtgggtcatccagaagacaatgagtacagtttggtatttgctgactcctacttttttaacttcactataagtcatgaactccgtaaaccttggctaggttccattttttatccttcagtattttattcactagttatcataggtaagctgccacacctatctgtcccaaaagcaatacctgtagaaaggagtgtcactaatagaaagacagagaagaaataagttgtgctaaagtttaggtgggatctgactggaataacagaaattaacttatcatcatcttgtaccataaaccaagctctgttggcagacctggacacctaagctgcatgcttcctgaagaaggagggaagggatggcagctgggcactgatcaccagcctagcagtgtttccatgattggcataggtgtcctgctcgccgcttatcttctggtaccttgatccacactgctttccatcacagcagtgccaaagcgagggtggagaacagcctatgattaacccaagtggaaagcataatggctttttgaacgtcttcattcacaaatggtgtcacacgaagtgctaatactctttcttgaacattgcaatatagtctttatacgctgcctttgttcatatctcggatgaaagaacagctcacagggaaaaaaatagtccctcgaggatgattttatcatttatattgcctatagtttggattcataattcgaatactttcattagttggcacctgtgtattatcatctgtctgtgggcatgtaattgagagcatttagagcagtcacccagcagtagccctgggaagcacaggagaattgtcgaccccttctcaggaggacaaaaatgaagcatgtgaagaaacctgttgaaaactgctgagcttccactattaccataggttttctgcctagagagtttggatgctcagttaataaaaccttacatttgaagggaatccacctgcaactggggcattttcacaccattctggcccagagagaagacagactaagctttagtaccctcgtttctcacaggaaaggaatctctagtctaaaggcatctgtgattagactcgtctatgagaagtggcactaaggcctcaatacctctgaggcctactcctctcttacacctgggtggctgtggaactcttaccctaatacacaaaacccttgggaataaaaaggctacttaaggtagctttcattttaactcaaatttcagttcccataaaataaacagattctatggtagcaaatagagccttatcaaatgtcacaggggaaagaaagcagtcattttctctgctctcagaatacagtacagtcatcaggtgttctaatacctctaatgaaagcagtggccaccacattcactggtcagctctcagtgaagtacttttattttaaacaatgcactgtggaagtaatacagactgtcctttggggtgccttgcttgataaatgcaatagaatcttgcttctgtttgacttggacagtcagtggcaggaaaaagggaaagctcacttagtgtcttgattctggtatttaggtgcacatagataaaatctggtccatttcttttgcgcttagcttacagctacaacttattaggtagtttttaatacgttttcttatttcttcttctgtgtctttttgttgctgacaattttatagggatgtttctttgactttttattcctttaaaaaaaaattaccccttatggcagctttaaggcagtggcaaaataattctttttccatgtggaagttggattaaaccttacagtaactatcacctggtaaccagaccacatataagtctgtcacttaggattctccactgatttattactctaagttagaatcagctgatgtatggctctacagtttttaacactgcagggttaatatggaacctgctggtacacatgaaacagttgtttcatctcctgttctaagactgatgaagtgtttaaaagatggctgtgtaatcagtccattatcttctagtgtttctgtttattttgttctgtgtggcagtgtacaatctcaaaattgattattctgctgtagttaacaggagaacaaaaggaagcagctgataaactgcatctcacaatccctgtcccaaattgatacttctgttttgttatcctcttccaggaaaagcacaggttatgatcatcagacctcctagaagcccataagctcagggcaagccctaggagacagaataattaatctattgccaatgtagttttgtacatttgctcattttagataagtgtggttaggcaaggctattgttcacttggttacacataggtagacaccctggaattaagaatgctgatgcttacagctttcttttgttctgaaagcaaagatacttggtgcagaatgtagatttctaaacagaatgtaggccagtgttcatttttaaatattctactttcataggcagctatgactataaaggagacttataagtgacatggtttgcttaagatctagtattttatacaaatcttatcttttaaaaaaaatcatcagacttttttctttaactgtagtctctagagatgttattcctgtttgcagaagtattggaagtagtctttatactgttttaaaaatacctttactattctctgagaatgttatacagtgcatttaagcatatttacccgcattcatctgtcttactactcacaggtaatctgtatactattactgatatttcaaggaagactgagatgcaaaaagttttacacaaagattagaaggttagattacagggactatttttgaacagtaagtgccacatgtttttgttcccccacccccttggttgattaagaattacaatgtattgcactgtggtatagttctgttcttgcagccacaatgagtttgtctgtaaagtatctaggaattccttatcaacagaggtttgtggaagctaagagtagggtgggatggagatgcatggctgttctcatttaggtgaaaaattatcaagatagaaattatttcattcaaattcaaaaataatgagttgtggcaccaaaaactttcattggaaactagttggaagccattggcattggttaagaagatagaaggtgtttctgtttctttctaggattcagtcatcagccatctcttggctccttctgttttctacttgaatgtctagctaattacttccaaactgactgagccctgcagccacaccctgtgtgtcgcagtatgaattttagccaaaataccaaaagaagaaatcaaactaacaagaaagcacatacagcatatactatctgagttttctgttccgtgtagctaacctacagagaaatgtaaacagtgccccacgttcctgcctccccaagtatatcttctgggaaagatgattaagtacaagaagtctgcatctgttaagttgcaatcggacccccnnnnnnnnnnnnnnnnnnnnnnnnnnnnnnnnnnnnnnnnnnnnnnnnnnnnnnnnnnnnnnnnnnnnnnnnnnnnnnnnnnnnnnnnnccccccagcccccccccagcccagattctatttgaaggggaaaaccatcaggaatttaaaagcttttagcagacaaacctagcttaaaatagagtttagacatttttggtatttaaagaccagtgaaatctttttattgtttctccaaagtggtataaccaaaagaagtcttagtatcaaataaagagtatgaagaaaactaatgatgtaaaagccaatctgagtctttaggctctagataacttagaagtgccctaattggatgtcctgaatttcctatctggggactttccaaagcagccagcacccagatgtgccctggcattgatgtcacaaaactgggtcatgggagtatgttccggataataccttttaaagtaatcttctgggtacagtttttaagagtctggatttgcagttttggctgagaataaatgatgttaaaattcacccagactttctcaacatcacctcaaagggtaggaaaaatgggttagggagagtggactctttgaggtcactgggagaatgatacaaataggtagttttcaagaaacaaattgccccagtgatttctattccttttatttgaagtatcaaatatttatgtggatatctttcttatacttcactttgattttcattacaaatattttttctttgttacagaatatcagattggccaaaggctaagagtatctttatagcaacgatacattgtactttcagttgcatttgtttatttgtaggaagtacgggtgtgccacagaatgagagcagaagtcagaagatgatttgcagtcagagttggttctctgctgctgcctgtggaagcagatgtgaatatggctccttaagcttggtgcaaacaccagtaccaactgggccatccctgcctgcccagctccatagctgatagtctttatatgctttttggttacatgaaattctccccagtgaggaggaaggaagatgggggatttttatttatttggtgtcacttctcttgatcttgatagcacacccctttctcctcctattactcctaccataggagcacaggagctttcataactccatctgctagctcgtaatttaccaaaaaagtcgcatgggaccctgctgcttttctctaccaaatcatcccaggcttcctgagatatttatagttcaacgtctttccattaccctcacacttaccatgtatctgtctctcgggtctccaagatcacctaagacactagtagtccagggaagcagtgaagaaagggggtagagtttagtgtgaccactgagtagcttgtttaaaaggactgcaagcagctggagaaatgctaagagtactagatactcttccagaggacctgggcccatatggcatttataaccatctatgaccccagttctgggggctccaacccctcttcttacctccaggatcaccaggcatgcatggtagaaagacaccatccaggtaaagcacccttacaaatgaaaagtaatgatagaaataatgttttaaaattaaaacgtgctgacagaagaaagaataagtagggaaaaaaggatagaaatgaattttgcatttttgagctaaatcttggcatgcaccattttttcatatgaatgcatgaaatttaggaattattaacaatgataaaatgttggacataattagcaagaagtatatttttctctcattcttgtgaattttaccacatggtttatttttttaaaagaaaaacaacagtattctcaccaaagttaaacattaatttgtctacatagtttttatgcacatttttaatattctaaaaccaaattttatccttaccatgtatttgcaataataattatttgggatagtcactagaagatatactgaaggtgtgaggtgaacgcagcatgtcaggacctctcctgagttgtcattactttaccatgcaggggttttagctattgggtattacattaatgaggatataagctaaactattagagagcagattcctttttgttagcattgagaatcgcgtgtggattggtcatgatggtacatgccttttatctcaaaccactggaatcagctgcagcagagctctaggaagtcaaggccagcctggtatacacatatgagttccaggacagtcagggccatacaaagagaccctgtcttaaaacaataacgaagaatcctgcatgggcactcctagttgatagataggttgcctccccatgaggctccaaggatctagacatcgttttcttttagctgtgccatctccactcatgcgacacaaagggaaagaatgtgaggtagtctgtcatgtctgctctattaaaagccaggacctggggcaggaaatgtcacttctccttgcacctgcctggatgtatgtggcttcgtgcaaccagcgaggaaatgtggattttagcatgtgcgctactatatcttttacactgctgcgggtggggggaaacatgggttttggtgaacagccagtattctctgccgcaggggttcttttgttgttgatgatgttgtttgtttgtttttgttttttcctgtttttaatcaattttttttcatataatatatcctgatcatctcatatactataccctgattatggttcccctccttcttctcgtcccagttcctcccactcccacccccttccaggtatactccctttcgttagaaaacaaacaggcttctaaggaaaaacaacaaattaaaatacacgacagtaagataaaacaaaacaaacacattggaattagacaagaaaagcaaaagagtgcaagagaaagctcaagacttagagatccacgagtttgcagtcagaaatctcataaatagcaataactgaaagccgtaaccctaaggcagaggacctggtgctgacatgtgtgtcagccgcagtctctgagctccggagctttgatcatgtttactgagggggatttgcttcttggtcctccatctcctctgggttttattctctttctgtctcctcttccctggggtttcttgaggagagaaatttgatagtgacatcccatttagggctgagtgtccaacggtcactaactctgcattgtttctctgtgtttttctcatttactacaagagaaagcttctgtggtgatggctgagcaagacactgttccatgagtatagctaaatgtcattataggtcatttctttgtgtgtgtggtagtaaaaatagtattttataaccccacccccaccctggcaatccccagtacactttttccctctcgttcccacagcaacgctacaatcagaaagaaaaaaaataagtttcagggggcaggaaaggaatgggggagaaggggcatgggtaaaagcagtcaagtcacaataggaattttcccaaacacgttaattccccttacccgtcctctttgccctcatcctcaggttcttgttttcacttctgactcccttcttcttcactagcttcttcctcatcgctctcgtcttccacttcccagttgtaaccttcttcatccttctcctcaccactcacatcctcttcctccccttcttcctcatcttcttcatcttccactagctgggcatgtttatcatatcctcatcttcttcgttgtcatcctccacatagccctcaatgtctgagtcaaggaccgttttgttgctggattttttgtttgtttggttggttggttagttggtttggttttgattttggttggtttggttgcttggttgtttggctgtggggagggagggttagaacagtggtatttggtctcactctacattcttggactatctagtctctggttcttggtcaccctagcaatgtcggatatggattccatcttgtggaatgaccttaagtcaaatcagacagtggttgttactaccacaagctttgtgccatcattgccccagcacgtcttgcaggcagcacaccattgtaggttcaaaggttttgtggctaggttggtgtttacatttctcctttgatagtatctagagtaccttcctgtccaaagactgtacagtgtaggggtgagactctataggaacttctccatgttcaattggttatgtagatgttttcagcaatagggccttgctgtcaatttatggagagcaacctatagttttggcaaaagagattaggttgcttggggattcccacaaaaccccaagaactcaattagatgtaacccaatcccagtactagaagctgcattgatgaccagagatggccagatggaattcagactcccttattatttggtttcatttagattgtcttcagatgtatctattttaagaagcttttactgtattcgtttctcacactaccttccaaatggtgtacttttagctgattcttctcagattacctccctgctacccctttgtctttacacttccctctcccaacttgatcccctcttcaagcccccttccattcgtaataagatctatctgtagtatagatacatagtcccttacctaacttctgtagttctgtggactatagcttgtttatcattggcttagcagctaatacccatatataagtgaagccatatttacttatttgtgttcctaggtcttggataccccactcagggtgatttttttttctagttctgtttatctgcaaattttatgatttgatgtttttagcagctaaataatactccattgtgtaaatgtaccactctttatccattttactgtggagggacatctaggttgctttcagtttctggctattatgaataaagcagcaatgaacatagttaagcaagtatctctataaggtgaaaagtctttgggataaatgcctgaaagtagtatagctgatcttggaataagttgattcctatcttcctcaggagttgccacactgctttcagtagctgtacaaagcactgccaaaagaaatggatgggtgcccccttactccacaagctcccaagcatgaggtgctgcttgctttattgatcttagacatactgacaggaaattccaaagttgtttcaatttgtattttcctgatgactgcttgagcttctacttttgagatatctgtgtgtttatatctgtacctcatttaactgggttgttttcttgatatatatttttagttcagtatatatttttaatattagccctctattagatgtggagttggcattgtaggctgccattttatcccgatgactatgtcttttaccaggcagaagcttctcatgaggtcccatttgttaattgttgacattggtaccttactaacagtcttctcttcagagagccttctcctgtgctagtgagttcaagggtattgtctatgtttctatcatattcagtatatctggcttcatgtcaaagtctttaatcagcttggagttgagttttatgcaggtgataaatatgtacccatgtggattcctctccatgcagccatccaggctgaccagcactatttgttcaaggtgttatcttttttttcagtgtgtgtttctggcttctctatcaaaaatcatatttcaataagtgtatggatttatgttggggctccaagtcaattccattgatcaacatgtcaggttttttttgccaatactatgctgccttttttactatagttcactaatacaatttgaaattaaggatggtgatacctaccttgttttgtttttttttttgttttgttttgttttgtttttgtcattcaggtttgttttaactatcctggatttttttgtgtttccttgtgaaacagacttattcctttcaagatctctgaagaactgtgttagaattttgatggggattacattgactctgcatattacctttggtagaatggccattttttctatattaatcctaccaatctacaatcataggtgatctttccatcttttgatatcttcttcagtttttttctttagtgtcttaaaatttttatcatacaagtctttagcttgcatatttaaagatacccctagatattttatattatttgaggctattgtgaagggtgttgttttcatatttctttctcagtctgtatgtcatttgtatataggagggctattggatttatgagttactctttgtactggctagttttgtgtcaacttgacacagctggagttatcacagagaaaggagcttcagttaaggaaatgcctccatgagatacaactgtaaggcattttctcaattagttatcaagggggaaaggcctcttgtgggtggtgtcatctctgggctggtagtcttggttctataagagagcaggctgagccagccaggggaagcaagccagtaaagaacatccctccatggcctctgcatcagctcctgctttctgatctgcttgagttccagtcctgacttccttggtgatgaacagcagtatggaattgtaagctgaataaaccctttcctccccaacttgcttcttggtcatgatgtttgtgcaggaatagaaaccctgactaagacacttttgtatccaattattttgctgaaagtaaaaatatatactttgatttcttccttttcagtttgtattcccttgatttccttcagttgtcctgttgctctttctaagatttcaagaactccataataggtgtggaaagagtggctaaccttgtcatgttcctgattttagtggaattactgtgagtttctctccatgtaagttgatttaaattgcctttattatgttctttgtatcactagtctctccaggacttttatcatgatggagtgttggatttttttctcaaaggccttttcttgtctaatgaggtgatcatgtttttttgttgttgttgttttatcgttgttgttgttgttatgtctttcagtttgtttatatggtagattatattaatcagtttatgtatgttgtaccatccctgcatatctgggatgaagtctacttggtcacggtgggtggctttttgatgtgttctcaggttcagtattgagaatttttgtatctgtgttcattagggaaattggtctataattcactctctttgttggatctttatgtagtgtaggtttcaaggtaattgtatcctcctaaagtgaattgtgcaatgttccttttatttctgttttgtggaataatttaaaaagtattcacaataagtctcctttgaaattcttctggtagaattctgggctaaaagtacctggtcctgggcttttttttgtatagggtatttttttaaattactgggttttttgttttgttttgttttgttttttccattttttattaggtatttagctcatttacatttccaatgctataccaaaagtcccccatacccactcacccccactcccctacccacccactccccctttttggccctggcgttcccctgtattggggcatataaagtttgcaagtccaatgggcctctctttgcagtgatggccgactaggccatcttttgatacatatgcagctagagacaagggctccggggtactggttagttcataatgttgttccacctatagggttgcagatccctttagttccttgggtgctttctctagttcctccattgggggccctgtggtccattcaatagctgactgtgagcatccacttctgtgtttgctaggccctggcatagtctcagaagaaacagctatatctgggtcctttcagcaaaatcttgctagtgtatgcaatggtgtcagcgtttggaagctgatcatgggatggatctctggatatggcaatcactagatggtccatcctttcgtcacacttccaaattttgtctctgtaactccttccatgggtgttttgtttcctattctaagaaggggcaaagtgtccacactttggtcttcgttctcttgggtttaatgtgtttagcaaattgtatcttatatcttgggtatcctaagtttctgggctaatatccacttatcagtgagtacatattttgaaagttcctttgtgattgggttacctcactcaggatgatgccctccaggtccatccatttggctaggaatttcataaattcattctttttaatagctgagtagtactccattgtgtaaatgtaccacattttctgtatccattcctctgttgaggggcatctgggttctttccagcttctggctattataaataaggctgctatgaacatagtggagcatgtgtccttcttaccggttggggcatcttctgggtatatgcccagaagaggtattgttggatcttctggtagtactatgtcccattttctgaggaaccgccagactgatttccagagtggttgtacaagcttgcaatcccaccaacaatggaggagtgttcctctttctccacatccttgccagcatctgcttctacatcattagaggttacaggtctgtttaaagggcttaccggttcttgatataaatttggtaggtggtacgtatgaataaaattgtccacttcttttagatgttccagtttggtggagtgaaggtttgtaaagtatgtccttctgattctctgtacttccctgatgtctgttatttccacctttgcatttctgattttgttcatttggttttctctctctgcctcttagttaatttggataaggatttgtcgatcttaattggcttttctcaaaggaccaactcttgtttcattgagtctttgtaatttttgtttgtgttttattgatttaagccttgagtttgattgtttcttgccatctattcctttgggtatgatttcttctttttgttctagagctttcaggtgtgctgttaaattactggtatgagagctctgtgtgtacacacacacatgtatatatatatatatatatatgtatgtatgtatgtatgtatatatatatatatgtatatgtgtatgtgtatgtgtatgtatacacacacacacatatgtttatagtcagtgctgtgaagttgcctttagaattgccttcattgtgtcccataagtttgggtatgttgtgtattcagtttcattcagttcacaaaagtcttaatttctttcctagtttctgttttgacctatttttcactcactagtcttcatgagtttgtaagctttctgtggtttctggtgttgatgcctagctttaatccgtggtggttagataggatgcaggatattattgaagttttctagtatctgttgagacttgttttgagtctgagaatgtagttaattttggagaaagttctatgaggtgcaaagaggaagatatgttcttttgatttggggtgaaatgctctgtaaatatctgttaagtccatttggtttataatcttagtcacctccagcattgttctgtttagtttttgtgtagatggcttgtctattggctagagtagggcatttgttcagtaatctttcatagtaaatttaaatgcttggccccctgtgctgtgctacatgagcaaatgctacaccaggctacatgagcaaaggctctttgacaaactggaatttattcagggacttccagccagcttcagtaatagcctagataggtatattgattaaaataagtgctcctgtcactaacatctgaagtatcccagaactttgggaaaagatgtttggaatgtacactgtcttgaatcacttgagatattgatggtctagttataaaatataattagaactatgagacccatggtcatggagaaatctcttttgatcacaaagaagtgttagtataatttgtctcctgcacaattagaagttaatagagtagccttggcttttctatgcaaataaatctttcctacctacagcttttctgctcttggcatgttttgttgttattgttgttgttgttgttgttgttgttgttgttgttgttttataacaagctttttcatgccccataataatgtgtggttggagtaaaatctataaaagcaatgaccctgaaatacaaaaaggctaaagtgcatgggaattcatctacatgtagtcatctgaggaagaactggaagcccatgagatgtttattttccctttttaaaaaagtttaataggagaataagtgttattggctatgatagcaaaaaaatgaaaacttttagatcaaattctacttggacatgcatgcagtatgggaaagttgataggtggcatactcttcctctcatggtctcagtggctctggcactcagttcacggcattaaaaagttttggaaaccatgaaatcaaggacatttttccctttctgaggtattctagggagagattctctttcatagaatacaaatcactttttgcctgctaatgaatgagaagttaactgcaggttagtggggtcgaaggacaggaaccttatattcttcctctatccaagatcattgcatcgtatttgatcttctgaaaaatggaaggccatacttagcatgtgtccacttaggtgaagaaaaatgaagaagttgcaacctctgagaagtgtaaatctgcctgcttggctaggctttgtcagtaaccagtgtgtatgctcttaagataagacctctttatgcttctatttcttttattggaaatgacgattaaattagatggctgttcctaagatctacttatttctttactccaacattagaagttgatcacagggaaatcagaaagattgcttgttcaaaaccacagtgtggctaatgtttgtcactttgccccaagcatgtaatctgggggttattttcctctttcacagctctctcatggctcgctcagcaatggcattctcactgtatagacatttatcaaagcttgtcatcacaggttgattacagtgtagtttaggtcatttcgaaggcaaatcatagtgcagtttattactaggaaattttgttttactgtcaatctaagctataaagtaaaagtatgaatcccaaaacaactgagaggaatggttagagcagaagatggaatcactgtcaacattacaccttccactttcagaaatgccatcacctgggtggtcttcatggtgctcctaaatgatgtattaaaaggaagaaaagaacctatctctgtttcctttgttctaagtccagagtcaggatttagcaatgatcattaggtgactaaatggtcaaacaaaatgtatgcattctgcctgacagctaaacaacactgccttggatcagaaattggaaaattatacccagtccattctcagaaagtgggatgttgcatggacagtacttactgcttgtggctcagtttggacaggcttatagaatataaaccacaaaagaaaattataatgttgtaggttgaccagatgggggtaggtctttaaatgaacatttaattctaaaactacggtcttggggttggagagttggctcggtagttaggatcattgagtaatcttgcaaaggacctgggttctatctgcagcatccacatggcagctcaacaaccatttttatctttggtccaaggggaaacaatgcctttttctggtctctgctgacaccaaggcatgtacatggtgtatagacatgcatgtaggcaatatccctatactttttaaaaaacttagttgaaaatttaaaaacctagtgttgagataccatacctggcagcatactatgccataagtaggagccatggaatctcacagagctgtggtgatcattaaggtaacatggaaattaacttatcatagagttgcagcaagaagcagaagtttaccaggcaagtaaggggctgtcacagtgcatttcatatttgatgagaaacttgagaataaagtccagatctgggaacacctttccatgtactccacactgtcctcctccctttctgtccttggaacccaggaaactgcatctccatgcaaagcctaggatggctgcctttttctttctgtgtcatcgacttacagtaaagcaacaaaactaggtttcaagacttggcactcggttgtcctcattgatagcagcaggcttggtttcaaccaagtgtttgcttgcttgcttatttgtttgtttgttttaagaagttcttggaggcatccttttatttttatttatttatttattcactttacatcccaatatcacccccttctcctcccagtaacccctcacacagattctcctccataccccctcctcctctgcaaatggggagtaccccctgggttgtgaacccctacccaccaggcacatcacatcacttcaggactaggtacatcttctcccactgaaccagacaaggcagcccagctaggggaacaggatccacacacaggcaacagattcagggacagccccaattccagtgttggggacccacatgaagaccacgctgcacttctgctgcatatgttcagggtcaagcccatggttgttctttggttgatggtttagtctctgggagccccccaagggtccaggttttttcctctgttggtctttctgtggagtccctgacctcttcagtctctcagtctttctcccaactcttcctcaatacttccctgactgcatctaatgtttggctgtggatctctgtaactatttctattgcctgctggacggagcctctcttttacaatccttgaaagaacaattctcaacttcatatggaaaaaaaaaaaacccaggatagctgaaataatcctgtacaataaaagaacttctgggagctcgtgtctctaggtgcctagtcagccatcattgggaagacaggccccttggtcttgcaaactttatatgcctcagtacgggggaatgccagggccaagaagtgggagtgtgggggggaggaaagggggggagggtctgggggactttttgggatagcatttgaaatgtaaatgaagaaaatacctaattaaaaaaaaaagaatttatgtaggtatcaccatccctgacttaaagctgtactacagagcaattgaaatgagaactgcatggtgttgctatagaaacagacaggttgatcaaatgaactgtttaagggaatgtgtggcacatagaagcacaccatagaatgtacaactgggaaaaatttggtgtaccttaaatacaaaaagtcaactaaaatgattccattaaaattgattttctgtttagaggctgtataaatggatgctcagagtagtcaaagccatgcagatggttgaacatggatggttctgagtgattcagtcaaaagccagtcaaggcgagcaatcccaaaccctactaaagcgtttgtgctcatcactttaaaagaggtcccgtatccctcctccaatccagagactcactgaggcagcttcacatgtggtgagcctgtcagtgctgcctttccttagtccagtgtcctttgttaaaagaaaggaatactggaatacagtagcttacccctacctgcctcaaaggggaacctgcttagagtctgcttgtgattaaggcttctgagagaaacctgataaattaaacatagataataatctctaacatccaagaagaacttttcatgtatttcctctgtttttaatcctattattaaccctacactacaaaaaaagaatgagaggcttaaagaggcaatttgtcaaacgtgccatcacactgagacccaaagaagggacaagtatctgatacagtctaggggtcttgattgggttcattttctctcccaattaaagaattttaaagggaagaaaagtctcaagtgggacaggtagcagtagacagatctggaacaccacaatcaggagccaacagaaaaataccttgaggaaaggcatttgttgtggataatggagtgcatacatgcagcagatacatagaaaaaaggatcttcaaaccagagggtagactagggaacatgaaaacccatctcttctcaaacgctggagttttttatggtttgttgtttggttggttggttgtttgtttggttggttggttagttttgttttgttttgttttgttttgttttgtttttttaaagtctctaaatagttttcttcccctagttttgagttggtctgtttgaaggaatctacaatggttgattggcccacaattattgcataacatgccctgatcaggccttgaactagctgagcccgtccactagcagagggcctactaatggaagacaaaagcctacaggcctttgtttttagctgaattggtttttgtctcaagttaggacagtgaggaagaagccagccatcttggaagttcaccacctttattgcctagaccctctccctgtctgcctccctactgagtaatctaattcctcagggttcctaactccccactctcagaagtcacccttggggtttgggagtgcctctcagttgcttctagctgaccagaggaatgatgagggacaagcagcagtctgagtatctgagacagaggttgatctaagggactgtgatgtctaggatccagagcataatataggcatgtggtggtagtatgtatctttggagcttgccatggagggagatagtatctgtaacactcaaaaagtgaaattgttaataattcttaattcctactaaaagcacaatttaaaagttatcttgagcaatttagtccttattagaggaagaaagcaggcaggaaaaccatctagagatttctcaggcttagtcataggtatcagtgagattgatagtttctctgccaccattatttaccatgagatatgctccctaggatctggagagatggctcagaagttagaagcacttacagttcttgcagaggaccaaggtttggttcccagtaccttcatgctagcttcccacctgagaacactgtgagacatgtcaattaaagtaattgtcctaattggggtgcctttctggaaataggtgtctttgctgatataccagatgtgttatctagtggtggtgggcattatgaccaaacctgagtaacatcaagattctatttgctgatgccacaattagatgcagacatccgtatctaattcacaggctaaagaagagtagcttgttttcttgatttgcttgccttgtagtgtcccaggaacaccattttgccatcttgaataatttcccaaacctatgagtctgacaacaggatatctggtagcctcttttaatcagggaatgtgggtagttagagcacaggatgtcatataatacatgagatttgctggaaagatcatgaatgaaatagagaaataacaagtagtacttagaaaactgtcacatcaaccatgaaaattaaaggaaattttccacatggctcctaaatgtatttcttacctgatttccaccattttaaatggcttacttaattctttggaatggggtggaaactattataatagtgtttgcaaatattaactcaagggttcagaaagtctgcagtaagtacagtctttacttcagttaacatggtttccatagccaaaggatttctgtctttgttttattatataaaggccaaagtgtggaagaaagggtagcagatccttaaaatcaaaaccagcattgttctgtttgtattacaagtcccccttgcagagctcagacaccagtatccaagaagtcacccattgaacatgataataaaagagcactgttgcaactggtgcagactaggcatgaggctaggttgtagtttagccagactagcattagagggcctgtgttcttgtgaatggagttaatataccaactaaacaaaaccacaagattgaagaaaatggcctgacctacaagcgtctaataatccagtgtgctgaagttgaggtttgtgtggaaatggatagcagttaaacctagtctctctgccactggaattcaataaaaatgccattctctcctccagacaatttatattataaaatgattttatattagaaactttgttttaatgagctatctcactactttagaagctagatcctctttagttgaatttaagacaaaactaccatacatagcattcaatgctgtattgtcttccttgatcggtgttaagatacctcggctcacttcctctttacagaagaccaattactgctgttcctactggcatctggtctacctcaccaggatgacatgggaaagtgactggacagtaccttgggatagtaaccgctgtcaccttagggaagccattcagtgtgactttccttactgacttgttagcttttaccttaaatttctctcctctcctctcctctcctctcctctcatctctcttctggtcaagaccatgtatttgcactttttataaaggagttacaggcttcaaaaaaaaaaaaaaattctgattaattttttttttccattttttattaggtatttagctcatttacatttccaatgctataccaaaagtcccccatatccacccacccccactcccctgcccacccactccccctttttggccctggtgtnnnnnnnnnnnnnnnnnnnnccctcccctcccccgaataagaaaatgtaatcagattttctgtttgcttattatcttttattccaaaggacaaacagcattttctgttacagaagaacctgctttcttcattggcactgtcccctgtgaggtctgaacaagcactcataagctcagcagtgagcttacatttctattactgggaactggggcaaaagtgtttaaagaaacagctaattgtagcacttgctccacgaggggggcaaagatgacttcaacattttttcagatacttctacaaatatcagatactttaaaggattattccagagaacccagaagaggacagcataggttcttgtcatttcttcagttgagagtcatacttggaatttagaaagtgatagcttaggaagggataacacacacctcaggcctcaggactctttgccagaagtctagaaaatacacatttaatgtgtttgtttttttagtaacaacaaacacagaaaaaaacaaacaacaacaaaaatctgagctttttcctggcacaagattcaaaacagcaaggctttcttcagagtgctatgagacttagagaggatgacccctcccagggaagctaagggagaagctggcttcgcctggctctcctgacggtgagtagaagtgccttctcaggaggagtctgaaggagtgataggatgccacttagctgggtgtggtcagcacttgttcctttcccagattagctgagacactccatctaatttactatgtggtgtggttctgtctggagtaattgaaagttgttggaaagcactggggcctgaccccaggcgaccagaggaacaaatatggcatttggtaattcagatagtggtgcccacatgataaaagttctaaaaacaagtagactatctttctaggtagtactttgtatatcaagatgccaattatgggccaggcagtggtgacgcacacctttaatgccagcacttgggaggcagaggcaggtagatttctgagtttgaggccagcctggtctacaaagtaagttccaggacagccagggctatacagagaaaccctgtcttgaaaacaaacaaaacaaaaaacaaaaaaacaattgccaattatatcaaactctataaacctaagctaattggctaaggcttcattaaaaattgattcatacaggatggggctttgttgttgttattgttgttgttgtttgtttttttagggttcctgctgttttagaaacactttttaaaaggaaaggggtgttttgggtgacttagagacatgtaaaacaagttaaatttggggttataaaaggacataggtgatacaaaaggaggctcaaacacctcttggatctttgaaaataatgtaaaaccaatcaagtggtttggaggcggtcttcctgggctgtgtatgataggcagtgccttggaaggacactcctctgccagcaattctcaggaagtttccctgagtcttttcttcgtttgtttgtttgtttttgattgggaacagaattttgctatgtagccttgtctggcctccctgatctgaaattataggtatgtgctaccatacctggagttttaagtaggtgattgaaagctatctgtaaaatggaggagctggaagactaggctcgaagagtcagcttttaaaactgtgtgatggtacagaaaaggacataaagaccacagaatgtaacactgcctctgttttctctagttttcttttccttactttggaggttagaagtaataagaaagagagggtatacaaagacaccctctaatttcctgtggcttttctggttagctagatgaactttgctttatttgcacatatcatacctgctatgcctgtctttgtgctcatgtcactgcagcccccagctccccatctaggcacagagaagccacaggaattaaagcataaccaagagcacaggaatatgtttagaagatatggggccaagttttaagtattagcttgtgaaattaatagtatcacttttaaaactatatttcacatttttcataagcaaacctcatgttaagaatacagtagatccatcccatattcagctatcaaacgcagacactattgcacatgccagcaagattttcctgaaaggacctagatatagctgtctcttgtgaggctatgccagtgcctggcaaatacagaagtgaatgctcacagtcatctattggatggatcacagggcccccaagtggaggagctagagaaagtacccaaggagctgaaggggtctgcaaccctataggtggaacaacagtatgaactaaccagtacacgcccagagctcgtgtctctagctgcatttgtagcagaagatgtcctagtcagccatcattgggaagagaggccccttggtcttgcaaactttatatgccccagtacaggggaacgccagggccaagaagtggaagtgggtgggtaggggagcagggctgggggggggtataagggactttcaggatagcatttgaaatgtgaatgaagaaaatatctaataaaaaaattgaaaaaaaaaacacagtagaatgaatgaacacacagagcacttatccccatggcacaagctagtaagggtacatctgatatgtcttcattggcaagggcgagtctccttgataggaagatgtggctgaaggaagagctgcccttttgactcttcagtggtcctaagagcctccttgagcatctctggactttctaaaaatagtgctttgtcgttttttaacctcaaaacattaaatgtatagttacattctagaccattgaacaacacacttggttttgccttgtgtttgtttgtttgttttgccttgtttgttgttttgctttatttaagatcaatcctaacattgcttttaaaaattaatcagatagctgtctcttgtgagactatgccggggcctagcaaacacagaagtggatgctcacagtcagctaatggatggatcatagggctcccaatggaggagctagagaaagtagccaaggagctaaagggatctgcaaccctataggtggaacaacattatgaactaaccagtaccccggagctcttgactctagctgcatatatatcaaaagatggcctagtcggccatcactggaaagagaggcccattggacttggaaactttatatgccccagtacaggggaacaccagggccaaaaagggggagtgggtgggcaggggagtgggggtgggtggatatgggggactttttggtatagcattggaaatgtaaatgagctaaatacctaataaaaaatggaaaaaaaaaattaatcagaatttttttttttttttgaagcctgtaactcctttataaaaagtgcaaatacatggtcttgaccaggagagagctagaaattgataggtaaaactacagtatatgggaaatttattgagtttaaaatcatcttatatcaacaaccttctgactctaaaaaatatattctctgcatagtagctaaaatttggggagaaaatagattacaagagaaattgtgtgtatagagtatgtcctcttttggcttaaactagcttgcattcaagatccagttgaaaccctactccaataaagagtcgtctgatttgttcataaatgcagatacaagcaacaacaacaccccaccacatttataattagaaaactatatgaggcttcctgatttggccttcctgggcctgattttgcagcccctcagaattcaaaggtagcttgtaaagaaaattttaattcatgtgataactattgacatttggaatgccagtataccttgaattgaatttctctgccaggactattactttgggacagggggaggtcacacatacaggcttcaatcattaaatgctcattctgtagctgtttttaaatctgcatttgcttcgatttagaaaacaaactagatttcctatggctatgttgttgaataaccttagagacatggataaacctcttgagtttgttgatggcagattcctaactagtgcacaacacagtcagcttcagatcagaaatatttgttttcaatcaccttctcttcttgctcctctacttgcatggttatctataattttttaaaggtagcacaatcttccatattaaaaaaatgtttaaaaatggacattgcaaataagccactttttgcatttaaagagcactttaaaagagagtttgtctttgggtcaggctggtgactgcaagagaaattacgaggcctgccttcttagtaccaacagcacatgggatgggccccagccaatgaagtagatgttactagcatgttacctgagatttcttactgcccctagtaagttactatttccggaatttaaaaaaaaaaaaatccaagtcattaacctcctgtctttgtacttggattctttaaatatagacacacattaaatttttaaaaatatctaccatattctccatattttagagtcaagggcttaaagaactgggtcttctagaataacccagcacctgcagagcatgagctcagagaggtaaccctctccagggccatagcttaaacatcccaggggcgattttcttaacaagctgcttgtcactttccttacgggcagaattcactttaaaatctgatctgttagcaacatcctcttgagctatgttgatgctacctttcacactgaagactataactgctgcctgaataagagcaagccaggatagaaagtggttatctctacacaagtactactttccccaccctgtgaatattattaccaaaaatttccaagtacaaattttctagagaaacatctgtggtttgaaaagatttgcaataacccagatggtttctttcagaataaatgtgcttgataatttaaaattaaactctttcagtaaaattgagtggtgttttttaatagtttttttaagacagagaaaaagtgtgtgtgtgtgcatgtgtgtgaatgtgtgtgcacttgagttcctgttgtatgcacgtgcatgttccattggcctgtctgttaaggtctttatctttggaaacagaaaaaaattaacaatgtcacaaattattcagcaattaagatggaaaaatgcccaagggaactctttatgacagcagaaacggttactgaaaatataatagacactgactaccctatttagactatgtggttctgggcttgtctgggaattactactctcagctttctgatacatgatggtatagtcagtcacatctcatagttacaatacttattacagattgctttaccaaccagtcgtatacaactgtgttgctagacttgcccatttcttggaacatggacaataaaggctccaattgcccctgacagtcctgtgagaagatagatgggatgacagatgtgacgttggaataagtgctttactgtggttctcaatgtcctatagtattgcctcactatctcctgacaccctgaggttttcttcttgaagctgcacacaggatgccttcatacaatgtgtgtacatacccccatctcttccatacttatgactatgtccccttctacattctctattgattgatagagctttaaaagtttaacagcataattaattcttagtgagttgtcagtagtctgttaaaaaaaaaaaacaccacaaaatattaacactaacacacacatgtgtgcacacacacacacacacacacacacacacacacacgccctagatatgcacagtatcaccagaagagtaatcagtagtgaaaatattagattcgacatagagagtacaatatttggttctgggattacctctaaatttttcccattggaccagtttttgtgaatgtcaaaagccctggaggcagtagggagttgttgataatggacacatgaaggatgattaaatgttttttctgttctgacttttattaactcagttaattattgttgttacaaaaggaatgctataaggtaatcagggcattgtgtttgtatttgtttttctacatttgaactttgccaaaagtccagactgaaatgctgtcactggcagaaactcctaaatgagtagatatgtgtgagacaaattataaagtgtatgtgctcattaaatagtatcacatgagcaaaatagaaaaacataaagcacaaaaggaaagcagcataaagcagaaatagacaggtttgaacttgtggaagcacacgagtcacacagtattcattttagttatcctcagagtccctgggatgcttaccgctcttctctgcaggggaacaacgcttttcttggtacctgtgatcgaggagcttcagtaatgaacactgccagaagacagctaacccctctgatatatgttgcagccactgaccatggataccatctgggtattgtaggtgtttagccacccaccttgaaaaactggtattgaagcagaacatgcagaaggagagaggcttgtctctagatctgatggctaagccatatggtgctacatctgacctggaaatgaattcagtacattccagacctgacttacagctggtgtggggaaatctaagagcaggtggttcccttaacagctgtactttcggttagggacagcaagaaagacagttttatgcttgcttaagccgtcatgggttatctgaaatcttccttgcctttttcccgtgattatatttttaaaaatcagagaagatgatatgttttcttcccttttagagatattctccatcgataaattaaaattttaagttaatgattaagagataggttggtagaaagtctatgataaactaaaagactaccctaaaacaatctataaatacattctaattctgggaatatgcaaatcaaaatcccactgggagagactaatgcttcatcctactaaatgctgcatctatggtaactctttaaaaacggatgtctatatttgcgatgcaaattttaagacaatcattttcatttgtgaaaagtgaaaagtcacttttagcaaaatgaaaagttgtatattttcaaaaaacttgcttgataagttttccttcatggaaatggaggtaactacaaaggaacagtgacacagagaaagaaatgtattttctcctcagtaatccaggaaccagacagtgaaacgaaaagaaaatacaggctaataattctagttttattggcagtcccatgacagctctcccacactagtaagatttgttcattgtgacagtcttccctactgaggatgtgattagggacagagaggtcatctagaccattaatgaactatggtaagaaactgtatccactttggagcaagtaggatggcttttaatttatatgaaaagctccaaatctgctcgctaagatgaagctgagctgctgggttcagcaaatgagcaaatagcaaaagtgttttacccaggtcttcaggatattcttctctggcattggagtaaagccagagcttaacttagtataatataaagagtgtctgtctaaatgaatgtgcagtaacggagttggcaagccgtgtatatatgaaagggtaagtagtggtctgtccgagatttcaccatagtgatggctcaggtagagtgcatggcggccttagagagatcaggagatttgggtgggtttgcattttctcttctgcatatcagccacttaccttggttaatgcctttctcttctgtgcctagtttcccatgactgctcaaatgtcatcttcaaactttccctttctgagaaacattttaaaaagggaaaacacacctcacctaccttctgttcaccaaaagacatttgttcatgatggaagcatcagtcaaattcacgttgaagtggctagaacagtcacacgcctccttcctcaaggttgccagtgcggtgtgtgggcctcggtgcttcccaatgaggcgggagtggcagtgatcttgacagaatctttaatcttgagatgactgcattgttggatcaggactcttcaactgggctcagtgtgaaaggagatttatgtcctctgtgtttgatgctacttctgcttagttcttaatctttaattccctgtcttttctctagtctctagactaatctggatattcttgggcctaaatttatttttacccctgaattttgtttttttgttgggattatttgctcattgattgttgtttttgagacagactcactgtgtagccttagctggcttgcagttaattcacaaaggccttcagtgaggtttattataatgtaaagtcaccaaggccatcattaggcagcaacgtacgatatatggctatatctaaacatggcaggactttagaggggagaaggggggagagactttccactaaagtctgaagagaaacttctttcaaagtgagaatgagagagagattgagagaaagagaccctgagagggggatggagagaggctggaggagccccttcagagaccacatttaatctccagaccagagaccttgagaagtttcagaccaatcccagcacacacacaaacaaaaacactgacctttatagacctttaggagtggtaggaagttttacttcccataatttagttcagcataacatatatgatagggatcatggaatagccaggtaccagttaggactgaaattataaaataagagactggcattacatcccagctcggacaacttaattgtttgtctcagagagagctgcaggaggacatggctataggatcaaggctaaaagttcacttctgggttgtaacttactagacagcccagatcaaagatagaatcttttttctttaaatttgtaaagatgggacaagatgactcactgggtaagatgcatacagccaaacctgacaacgggagtttattgggtctccgagattatgtggtagaaagacacttgactcctgccaagttgtcccttttgctgtggtgagcatatgattaactaattaattagataacttagtaaagggtttggggctggcttgttcgttttttggggatgttttgttttgttttgagacagggtctcactgtgtaaccttagctggcaatttgtaaagtgtttgtatattacttcttcccacactgattatgctgagaatctttatattaatgttaactaatatctttaagttggtaaaagggaaaggcaagccttcaggtccctgaagtaatgatcacagaatggtagagaacactggtttcaaagaggtgtctgccgaactgcactggagggatttgggcctggtttcgatcagctcttagaaattaacaatacaagatgttccacggccattatttactgcatgaaccagatttcacttgcatctgtttgggtacttactcattcatattgctaagtggttttagttgtgggttttggttttcaagacatgatttctctgtatagctgaggctatcctaaaactggctttgtagaccagtctagcctagaactaagagatcttcctgcctttgcacctgagtgctaggattaaaggcatgcactaacatgactagctcaatttaattttaaaatggttaaaattatctactttttttacaaacagggactgagtgtacagaacttggctttatgcactccatggcagagatgaaagaatactatcccagcctttaagagcctttctgtctatctagttcctaaacttttaagcttagaatatgttttataaatgtaacattctagagctactgtaagaaaattatacataatataagtatgccaatgttactctgagtaagtacttctctttattgaagttgctatggtccaagttccagtagcaccttccctctgtctcctaccgcctccttcatttctaatagttgtatcccaggctgtcagcacagaggaatggattgatctccaatgtgggtgaagctaataaacgtggtttaggatgaaagcactgtgtaaatgtgtgaggtgttgttattactgctctcgtgtgctttattatctttaaattgtgcatccttttaagtagattatttgttcaccacagtctccattatatctaagcaaagccttcaaagaaatttctaaaaccttttcatttctctctgtaggttgttgtttcgtaacattttatacaagaaaagctgcacttgaggcccagaatgcactgcacaatattaaaactttacctggggtgagtcggtttacttttgtaccaaaatcactttattgcttgaaaatggtcctttcaactaaaggttctagttatgggttcttagtgccaaaaatgactttggtcttttaaggagtacacgctggcccctctgttccctgcagtagccagactagctggccagcccacaaaaaagggctggcattagcactgatgggaaggactctcaaatagcatatcccctggttagaaaatcagagggaccctgctggctacagcagctgccaagagagtattgggtgggttgagattttaagggtggggcccccacatacaagtaaagcaaatggaaaagggaaagcttttactccccaggatccccttttcaatttccgtctttagattttcatttaaaggacaaaatgcactctgtatagacataatgttaaagctcctaatgacttctaaacagtcaatggtggttaacaaagccagtgttttagtgcgccttccttcatgttggaacatgcagaacggagcacaggaagctagcggtgctggttctcgcccccctcccagtaactcattagaaatgaactcacattacatgcaacactttcatcagcttgatcagactttgtggggtttttatatattacatggtactacgcatttccctttgttgtttacttggtatattttctgcatttacctcaatgtcagtggtgagttaatttaatagcataatgatgtgtgttagttataataaaggacctgtggtaaatattcaaggtcctgtgctgttattcaaatgtcttttggtaagaagaaaagaaggataaaatgtccatgatattacagggtatcatttcggtgtgtggttacttgctgtactggacacatacataaatcatgcgcatcaattacatatatgggtacatataagtactttagcctctggcttccccgaaagttagaatttgtgtaattcaacttaggcccatagaaaacttacaatgtctgtagtagaaagatactcagcaaaagattttcaaaatacaagttccatttgaggtagatggacttctgagacgaggtctaatgtgcttgctgacctctaacttatggataagtgctgagcttgcaggcaagtgtcatcacactccaccaaaatagtaacttctcagtcaccaagataataaattaatgaacacaggtgttcagccatcccacttggcttttctctttttcatctgagcaaatcgaataaaaagcaagagtgtggtgacaggatgacccttctgtggggcttcctcccgggactcccaaagtcatttgtagtagaatggcttttgctaaatctttcatcattgacttaaaaagtaataggaattaagcttcattcttgaggtgagttttccaatatcattctagaaagctgtagccaaatatctattgccttggacaaagaaagaagaaaattaactttttctgtctatactctaattcaaattatttttgttttcctgcttatacaaatgaatggtttacaataattagcacacaaaatcccttcctgatgctttaaaaattgtttttagtcatgaactgttctttactatatgaggagtgcagttagatgccgtataatttggttcattggaccacagcccttgagtagaagctgagttctcactttgttgtcttcctgtgcaaaggtgttttttagaaacccagaatttggtgataaagccagctgaccacatgtcaatattttattgtccagtttatggctttgtattgacacaggacagaaaatataaggctggtggtgttttcccatttccatggcagtaatatttgataagtataatttcctagagccctgggggaatatgaatgagaagtaccgacaactgctcttggggttggggacatcctagctctgcttcttaaagacaagtagtccttctgtatgtttttcacatagtgtatgttcttttctcctaaaattctgaatgtaaaattcaggaatggagactttggaaacctgtaattaaggacaataatttgggaattgtgggagagacaagataaatctttcagcagttaagaacacttactgctttggccaaaggacaagggttcaattcccagcacccacaggtagctttcccagggggtctgatgctgttttctggcctcctttgtaagaactaggcacatggtacacaaatatacatgcaagcaagatgcccatgcacataaaataaagatactcttaaattttaaagtaaataaactaagagttggaaaatacaattagtggaatatttttcttttttccatctcagtttcataggttcagttgcttgaagcaggttaagggaaaatttgacaagtcagatatgattagtaagattcaaaggtctccacagtacatacgtttgctacattgctcctggtcgatggggataaaaatctcacatcttacatttatgtgtagctgtgtcttacaaatgccacccttaacagctgcagggaagacatgaaagtagttgcctttctgttgtaagcctttggtaggtaggaagaaacgggaccagacataaaagattaatgcatattcttgaagaaaaattattacagggtaccttgctgtttgattacaagccttagaattagtcaacatttccataattctaaaccaatatacacctgttttcccactgcgatgtgaaggcacgacttaatttagcagaaaccctgctgtgctaaagctctcattaaatacccagtgagttcagtaatttaaagttgtagcactactatttaactggttgccttcatattataaaattaataagaaattaatgatgcactttgccatatgccttcagtttctttatgaataaaaattaaagggacaaagaaaagcacatgatcagctgacactgcgtcttctctggctgtgacttgactgtggagaaagtccattacttgctgcctttttcctaaagtgtctaaaactttcagtttataacaagatcaaatgtatgctttttctttcttgtacagttcatgttttatatcctaaggaatttttattctacagtgggattgattaatgttcaagattcccttttggtcttgtgcaccattttcccatcttgaaagaaacaaaaaacttggtttgtaaggagggaaggaaaccaataggaacgtctgtctatatgtcaagatgtgtgtgctcttaagtaggatgtgactgaagtgaagaattggggaattgtttttggtaacccaagtgtatatcttcagcccgttctgagaaatgtgtaacaagaaagctaataacaaactactagttactgagcaactgttgtgtcccacgtactatatagaaataaccaggatcaaacctgatgaggcctcttggtctagctggaggacagtagacagctaatacacacttgatccatgcattagtgcttttctacttctgacaaaatatggaaattatacacacacaattgaggtccctagtaagtagaatgcttatggtctgaaggagaatattatagccctatgtgcatagactaggtcacctaatgagccattgcatttccagcagcagtatttcattgacttttgtattcctatgccatttatgttcttaaaaatactctggttgcctctgatccaaaggtgtgacacactaggtttggtttaaagaatgcttcctttcaggataatataatatatcccaaacacagagttttagcctcataggtacaaagctttgcccagtaccacacacacagacaatatataagtcatattaaaaaaaaaatgtcccaaggaaagcagggaggggtacatgggaggtttaagagggaggaaagggaagggagaagcattgtaatttaattataatctcaaaaataaacataaacaaaaaatatagtgtcctttctttccttgttgaggcaaaaactagtgcaacccaaactggtctcaaatgtatgtgccttagcctccccagagcctgggttacagtgtgtgcccactctccacagtctccttccagacagctacagctagcacagatggcatcatcagaggagtgtcagcgtccaccactgtgtattcaagagggggttctcaggacagcagctgggctacatgcctttgttttcacttatctcccttatttagctcaattaaaaaaaaaattaagaagtctgaggccgactaggccatcctctgctacatatgcagctaaaaacacgagttcccggggtactggttagttcatattgttgttccacctatagggttgcagaccccttcagctccttgggtgctttctctagctcctccattgggggccctgtgatctatccaatagctgactgtgagcatccacttctgtgtttgccaggccccagcatagcctcctcacaagagacagctatatcagggtcctttcagcaaaatcttgctggtgtatgcaatggtgtcagtgtttggacgctgattatgggatggatccctgagtgtgacagtctctagatggtgcatccttttgtctcagctccaaactttgtatctgtaactccttccatgggtgttttgttcccaattctaagaaggggcaaagtgcccacactttgatcttcgttcttcttgagtttcatgtgttttgcaaattgtatcttgtatcttgggtattctaagtttctgggcaaatatccacttagtgagtacatatcatgtgagttctttagtgattgggttacctcattcaggatgataccctcggggaagagaggccccttggtcgtgcaaactttatatgcctcagtacagaggagtaccagggccaagaaatgggagcaggtgggtaggggagttgggggggtggtatgggggacttttgggatagcatttgaaatgtaaatgaagaaaatacgtaattttttaaaaaaagagtgtaggctttaaaaaaaaagtagtctgaggtgcagaaaaactcctaagatcttttcagtgatcagacattagagcaagatatcctcatgcaagtgatagcactgtgccatgagccacttttctcaaggtcttagcacactgtctttgtcagcaagactttcagattgaaatccacagctctatcagtagagcattctctttacaaactcatttcattaaggttgtaatatatgagaatacaattttaagaaagctcttaaacctgaacagtaaagagaaatctgaaatctaactgtcttgtaaaatattaattgcaaatttctttcagacatttttatgaatatgccttatcctttcctttttagaatggctaccagttttattaaatgcaatttatattaaggagatactgcctaagagaacacttgtttatagcactccattttggtaaatacatagtaaaaggtgttttatagtaccttatgcaatgtgagcaaggactacatatagatttgagttataaaaacaaatggtcctgataaactaggaagaggctgaaaataaaatgacctcctgcaacaggtatgtccactcatacgacgtgagtgggccctccctgactgccctggaggaagaatttacccacatgggtaggcagcttatcccaagtggaatttgactaagctatctatagaattattttcatgtccttaacagtgggatgctagggtttagtattttctgcagaaatactgcaatctccctgggaccaaattcactttgcccatagtaacctattttgagtcactcatttttccttaaagcatttctgctagtcattagtgtgtatttaataatgccttgttttcagagccatggatataattttacctttctcatcatcattatttctgtctccttctatttcccaactctttctatttttatatcatggaattatgaccccccaaataaatcacactatttaaattaatgtttaactaaaccaacttgagtaaatttcttctcagttatcctttatttaaatttatgaaaagaatagccaaaacatctgcataagtaggtttgcatctccgaaattctgtgccatgtgtaatataaaatatgtattcattcattgaacaaatagttcatttttattgtcttcaaggtactattctggatacctgggaatacagaatattaccattgcccttcataactgaataagaagaaaatgattgcaccgtgtttatactaagtaaaacttcaagaagtagctataagaaatttgatttacaaataataggctaatcttatttattccagtatttctaaagtagtcaagtattttcaagttctaatacagataaatatagatttacgttagtgcatagcactcgctctctctctctctctatctatctatctatatctatatatctctatatctatctatatatatagatagataaatggtaatttggcttattctgcatatacaaatcttatattcatgtacagtcttaaacagctataaagagatgagtcaagtaaatgcaggaatattaaattgaaagtcctactctcttattctgccagccaacttattcttagttgcttcattgtagtcacttgtcttagtcctcatcattgtcttagctcctcagtgcagtgacagtccttacagttcagtgagagtcttggcggatacaccaaacattgtaagagaatatttaagagctgctactaaatactcatgatccctgcctttcaccttaaaagaatactcagacactaagtggcatgttggacactaagtggcatgttgcctgtgaaattcctataatctgtaatctgatcttacaagtcattgtttctacttggtagcttctgtaggcatgaactcttgtaggcagccacccagcacagaaagtatattttctatggaatatataaaccagagttgtttgtttgtttgccttctgtagttttacatttgcaacgtttaactagaattaaagtatttgtcttcataggactgcctagaaagagctatgccctggttgttgctattattttgatataatgcttagaaatacaagctaactaaaaagtaaggtctttgattttctttttttttttttatagaattaatttttttattacgtattttcctcatttacatttccaatgctatccaaaaagtcccccataccctccccccccccacttccctacccacccattcccatttttttggccctggcgttcccctgtactgaggcatatacagtttgcaagtccaatgggcctctctttccagtgatggccgactaggccatcttttgatacatatgcagctagagtcaagagctctgaggtagtggttagttcataatgttgttccacctatagggttgcagatccctttagctccttgggtactttctctagctcctccattgggggccctgtagtctttgattttctttaaggtaactgaagactataacgaagtcttctaagatgtggcttcataggagtcccctagatgcaaaagtcccttcttaaccctgggagctacaccaggtgagattgcagggtccagtcgagtatatcacattgttccaagtttatggctttagagggaaaaaagttagaggctggaaagaaaccttagccaaattgttaccagtctgtagtccctgacagatcccagagacctgggaagattttaataaagaccgtgaaggctggaggcatgactttatagttgagagtactggctataattcctgaggacagtgttctatcctcagcacctacaaggtggttcacaactgcctatagctccatctacaagggatccaatgccttctcacctttgtgggcaccaggcacacataaagtacacagatacataggcaaaacattcatacatgtaattaaataaataaatttaaggaccatggggaaaatactcattccaggcagtattaagtttggttgctttgggctggctgtctatcaactcttagaagctttcactgacagttattgtatatggctctgatgaaatgacatgaaaaacaggatactttcaaacatggcctgttcactacaaggatgtgtacaggacaaagttgagtgttccttactgataaaaagtggaaaatgccagcagcgcaggataaaaatagagattcatctacaccaccttagaaacaaagaagtgaattctgtagaaggggtttctattttatttagcaaatgtcatctcagtggcatgctgaaatcataggattcttatggggcttcgtgagataatttgtgtgaatgccctagcactggtttccggtcagcttttcataattgctcttttcattctttgaaagcgattatgatttgattatgctttgtgactgactgggagaatgacacaatgctttgtgactgactgggagaatgacacaatggcaagttaaagtaacagatttgagacatcaccatttgcctacaattgctcaagagtaaacttggaatgctgagtttacttttaagaccttagatcccaaaaggttgataaaactttaaaggaaaagcatagaggaaaacatctatgaatttaattaaaggtctccatggaactgtaaagaaagagacaataagggctttcagggtcaaagatagaaattttgaaataaagccagataattctccaaattctgtcactttagtatgagattttcataagaatttgcctgaatagtggcagaacattaatccttcagtggtaagaaacttatgtccagttgaagcaggcttgacagttcgtagccacaaacttgaggcttccaaaataaataaaagtataacatgggtaagtgtggagagtgttctcctaagaacaccagagttcttcctcatctaccaagaagtggagaatagaagatcctggcatcagaatccaaagaaaacttagaagcgcactgctcgcctaggtctgcttagtgcagagaaggccataggtcactcccgaggggagacagaagggacttcatgggatttctctgtgtgatttccccgtggatggcattgcacataggtgctcagaaagcctcattagcagtatgacataaactataaaaatgtttttataatagaacagtgtttcaaaatgctgttacagctgtcacagtcattgatatgagaaacactgaacagtatgtgtgggagtctgcaaatactctttcatcttctccattgttctatcactgattcctatgaggacttgacacacatatgcctgcaccattgctccctccactaacgctttaaagcatttgtggaaattctttccttcttcacttgcaaaatcaaggctctggactagctgattctaaggatgttttcccagccctaaacagttgtactctgctttctatactttgtctgtaatcatgtcctgcttagtgaggggggaagcctacatctgtgtgacttgacttccctcagttattggttagtatttggagagtactttatgtaaaaacgatctgggtgactcagagcttcactcttcacttggaaattctcccggcacctgctccctttcccgcctaagaacttacaggtagctcagcacttacagctttccatccagacgcagaaagaaagggaaagagaatgaactctgtcaagtgtttagtcccttgtttacatccttgggttaggctagaaaggatggggatgtttaacctaatcaggtttgaattattagtgggctccttgtatctgtctgattctcgtctaacgctgctgaggacaaatgagtcatctgtaataggtctatggggttattttttgttatcctttctaaagatgtttcaggtgtgtatcaatagcattcaccttgttaaactggcaacattgaagtgtcaaagattaattaatttctctggcctcctctagcaaagcagtaacaactagagactgttaggctctagtatcagtgccctgtaagtggatttagacagagtattttaaagagagggaaacatgacttgcagaaacaacacagcacagtaataaaaaccatggctagaagaccggggagatggcttcgtgggtaaagcacttgctgtgctagcatggggactagagagctccaatccctagcactcacgtaaatgtagacgtggcaggctgcatgcagttccaagagacagtcagagacagtatgccaagaaccatctggttacccagactagcccaggcagtgagctctgagttcaattagagatactgcctcctccgtgaataaggtaaacaatcaaggaaagatgactgtcgtcagccccaagcctctgcagacatgcacacatacacttgcacttacacataaacaaacccttatacatacctatacacaggaacatgagtaaaaacaattgcagtcatactcctgatcgattgcccatatggaagctctaacactgtgtcttaactttgtctgcagcttcacaaaatacacattgaattgcctggttggtcttcttcccataattttttttattcatattacatccagtcacatccctcctccctcctctcctcccagtcctaccctcacaaatccctccccctatcctcagagaggggaaagctccccctgggcaccaacaccaccctgaggcatccagttccagcaggaataggcacctcttctatgacccaatatgaccaatgaggtccaattgataggggacatgcttgaagtccatgctgcacatctgttacaaacagggggtgggggggggactaggctcagcccctgcatggtctttggttggtggttcagtttgtgaacccccaatgggcccagattagttgacagttggtctatttgtgttcatacccctctatatcactatctcccactcttctacaagactctccaagctctgcccaatgcctggcaatgagtctctctgcatttgtttccactcaccactgaatgaagcctctcaggagacagccatactaagaaacctgtctgcaagcataacagaatatcattaataatgtcaggatttggctttctgctgtgatggatctcatggtaggccagtcactggtcagccatttcctcagccctgttccatctttatccctgtgatttgtaggcaggacaaactttgggctgaaggttttgtgggtggattgatgccctcctccttccactggcagtcctgcctggctacaggaggtggccacttcattccctctatctcctgctggtaggaatctcagctagggtcagccccatagacttcccatgacctcccctcatcccaggtcttcagctagtcccaaagatgtcccccaccaatttccattctcactcccagccctgtcttacccccccctccacctttcttcccatacctggtcaccattcctatacccctctttaccctgtctccctcccagttccctctctccatccacctatgatgactgttttgtttcccttctgagagattcacacattctccgttaggctctcctaattacccagtttctttgggtctggattgtagcatggttattctgccctttacagctaatgtccaattatgagcaagtacataccatatgtgtctttctgggtctgggctacctcacacaggattatattgtcaagttccattcattctcctgaaaatttcgtgatgtctttatttgcttgctgacctgtttgtttattcactttacatcccaatcgcttcccccttctcaatctcttcccgctcatccttccccttctcctctgagagactagaagcccaccccctggatatctccccaccttggcacgtcaagtctctgcagagctaggcacttctcccactgcggccagacaagacagcaaagttaagggaacagattccacagacaggcaacagctttagtatcacccccactccagttgttaggaacccacagtgaagaccaacctgcacatctgccgcatatgtgtactggaggtgggggcaggaggtgctatgtccaaagggtatatgccctttggttcagtctctgagagcccccagggtgcaggttaattgactgttgttcctgtggagttcctatcacggccctcaatccttcctccagctcttccataagagtcccaaagctccatctaatgtttggctgtctttgcacctgtctgggtcagctgctgggtagagcttctcagataacactcatgctaggctcctgtaggctctacaaacataacagaatatcattagtagtgtcagggattagagcttgcccattggctgggtctctagttgagctggttattgcttgggtattctctgatccattccctgtccctgcaattcttgtaagcaggataaattagggggcaaaagttttatgggtgggtgagtgtccctatcatccgctgatgttcttgcttggctataggaggtggcctcttcaggttccatatccccattgctgtgagtctcagctaagaacacccaattaattcttggaagcctcccttatccctacccccaccagctgcagattgctgttcattcttctggccttctcccctgtctctccccactcctgatcctgaagctcccccattcccctccccatcccctttactacccattttcctcccttcatctgcctcaggtgactgttttattcccacttctgagttagactcaagcatccttgcttgggccttcattcttgtttagcttctttgggtttgtggactctagtgtgagtgtcttgtatttcatggctaatatccacttataaggaagtgcatcctatgcatggcctttgagtttgggttaccttactcaggaagatattctcaagttccacccatttgcctacaaagttcataatgtctttgtttttaatagctaaataatattctattgtatagatgtactacattttctttatccattgtgcagctgaaggacatctaggttttttccagtttctaatatgaataaaactgttatgaacacagttcagcaagtgtccctgtagaataatggacatacatgccccaaatgcaaaggcatatatattcataaaaggaacattactaaaggttaaccacacattaatagtgggaggcttcaccttctcactctcgccaattgacaggccatctagacagaaattaaaaagaaataatgaagttaactgatattataagtcaaatggacctaacagatatctatagaacctttcaccaaaacacaaaataatataacttctcagcacctcagagaaccttctccaaaatgaccatatagtcagtcacaaagcaagcctcaacagatgaaagaggattgaaatcgccccttgtgccctatcagaccaccatgaattaaaactagacttcaacaacagaaacaacaggaaacctaaaaactcatggaaactaaacaactttattcaatgatcattggatcaggaaaaaaaaaatttagaaactttctaaaatccaatgaaaacaaaggttctacatacacaaacttatggaacatgatgaaagcagtactaaaaggacagttcatagcactaagtgccttcataaaggtattagagagttctcataccagcaacataaaagtacacctgaaagctctaggggtaaaaaagaagcaaacactcctaagaggaataggtggcaactcggggcttaaatcaatcaattagaaacaaagaggaaaatgcagactcaacaaaatcaagagctagttctttaagaaaatcaacaagagagacaaacccttagccaaacaaactaaaaggcaaagagacagtacccaaattaacaaaatcagaagtaaaaagggagacgtgacaacatacactaaggaaattcaaagaattgcctggtttcgatgacatgaaaatctatgagagaaggagtgggggagtggagagaggagagaggaaagagacatagaaagactgagggagagagtgggtatcctgtttcgattacccagctggtaactactttacaagtagtcagattcaaagccgagagtctgggttatggactcgatgaagggctttctactgttttctgtcatgacagtcctcgttcctgccatcagaacctgtcaagtctaggagttccttttgaggaatcttctgtcttagtctgctgcagatgacagcatggtgtgctgagctatcagtgtaatgaggacaactatgcaggttccagctgtgcaggatggcaccagcagttgagaccataaggtcatatagatatcttcacatgtgctcacaccatggactgatcctgctacagcatatttggctcagctcagcccagacatgaaaccatactctctagcagtcacaagtcatacaaaacactgtaggccaagcaaaaagtttgctaaaaactcaaatacgaggctgctattttacagttctcaaagaagaatatgaattatcaaagaatcaccctaagagaaatagctttgcaaaacaatgattataaatgcaacacctttcttcagaagagtatagctttaccaatatcatcccattgagattcatgttatgggggcttttctttatctctatacacacaggcttggtgccagcccatcatatgcattctaaggtctatctatcaaactggattccctatcctttcctattgttctgctcagttcctatgggacagacaggacagagcctggggcttattttaagactaagcaaaaacgtctcagcttgaagcagtaagggaaaagaatcatgccactgtcataaaaagggggaaacaactccagatgtcaacttgtccaccatcatcacactgtgctgcacagaatttggaggagttctgaaagcagctgggtttaccctgtggtttattgatgaggaagcttggcttggtggagtgaagtcttcataaccatggaagaagctactacagctccaccgcccctgccagcacggcagtgttctccagcacaggtgagggctctgagaaacaaaccaggcagccgattcctcagacatggtgtaatggcaccactcacagtcctcacccagccaaaggaaagcaatgactgctatcctcgggacccagatgtcggctgcagaagtactcgtgtctaccatcccttttcccagcctgcttcctgttctctctgtcccactgaactgttctcatcaagtgaagaggtagggtgaatgaataaatctgttcatcgtgctctcttgttttcatatgaatttaaaggagcactcacattcaggagcagactgcttttgccatccctttaggcccacagtttccatggcactgttatacatcagggataggagggaaagaatgacaggaaatccatctttacccctgggaagcttaactcagtgacttcagccatattatattctctgctctgtgaggtgagcagctgatgagcttgcccaaacaccgtatccttgtttcttcggaggagcatctttttaagtgcgtaccaaggaatgatgtaagatactttgtgcaaagtagtctgtgatgtccaccatacagaggttgtatcagcaagtcataggaattgtgaaattgtaaataaattactgccatttcatatattttatttgctggatgtagagcagagatgtagttgcagaacctcagcataagcacgtttttatcagatgttgcttctatatatatttgtgtatgcaatttctgtttttcagtggctttcaaattttaaataatttaataaaataatactaaatattccatcgataaaagttatagttggaccctggaggaatggttcaaccgtaaagagcattggtctctctaccagagaacccaggttcggtttccagcactgacatggcaggacacagttatctataactgcaattccacatgatccacaatcctcttctgtcctgcataggcactgcacacatgtagtatgtagatacatatgcatgcagaataccagtacatataaaataaaaaatgaagctaaagaaaataaagaaaaaaggttttaaaataatagtgcttgtctttactgtcccgggtacagggccaagagtgctatcttatctgcctacctactaactacctacaaacctatatctgataacatatagataataaaatactgatgatttattttctgtttctggttgccttttcaaccagacatctgttaagattaagagtgcccccaatggaggagctagagaaagtatccaaggagctaaagagatctgcaaccctgtaggtgcaacattatgcactaaccagtaccccggagctcttgactctagctgcatatgtatcaaaagatggcctagtcggccatcactagaaagagaggcccattggacgggcaaactttatatgcctcagtacaggggaacgccagggccaaaaagtgggagtgggtnnnnnnnnnnnnnnnnnnnnaatgtaattgaggaaaatacgtaataaaaaatatttaaaaaaaaaagattaagaaagctaaagtgattatacctaataaataatttcaaataacaaaatcatcaaatgaatatcttttatgaccttgtccaactagatgcaagtaaaaagtatacttatcctagatgataggttccattacccccagcttagacctgaaaccttatagtactgaaccctgtttatagctctttcttgcaaacatacttttaaatgcatagagtataatatcggtattccagacaaacgtttcagcatgaagctcagaatgacatggtatttaaaacttacaagttacttctggaaattcccatgtaatttttcagggctttatttaactatggaaagcgaaacctcagactaccgcttactgtataacctagaaaacaactgtcatttaattgaggtttagctcctgtctttctaactcattgccaggatatgacttaggaactattatttataagctatcatttaagtaggtacatgaactcttgtctggattttgattaatttgggggattttgtttgtttgggtgtggtgtgtgtgtgtgtgtgtgtgtgtgtgtgtgtgtgtagctcatagaaagtaactatgaccacagctcctcaaaaaagtcctcccaagtaccactgaatcacttgctcaggaatctgtcttaaagtgtctttaagtcatttctgagtcacagttgtcccaatgtgaaaccttcctaggtcgttaaccaaaattaagtatctatgcagaaaataaaagtcaaaatctcagcaaatcttatagctaattaaaataggtttctctttgtttcactttcttatgtgggccaacagaggaagaaaaaaatatatggagtagagaaagtaggctaaatctaatgatagtcacagtgtaggagcttatattagccagcctccctacattatagatgaagaacctggaacccgaaaggtcagctgagagtgtgctaatataacaaccaagtattgctcaaaaagggcaacaaagcaggtcatgtcctcatcgtctgcctgtgaagttatgccagacacagtgtttagagactcagaaattcagagtccaaattaccagtgtattcattcaggccgttggtgttttgtttgttcatttttatttctgagtaaaacctaaagaactcagcagcagcagcagcagcatctctctggcaatttatctaaaatgatcatgaggcagatgagtttaaaacaaattaaagaagaaaatgaaagcaacccataatactcaactctgtctgtaactgcaactagagcagtgattcccaatttcatctgtaaggtaagactttgggaatcttggaaatatttttaaattatatatgcaaagctttaccatgggtagaataaataagactcttttgtagataggagccgagcatccatgtttttaaagcttcccaaagggttccagtgttgggtaagtttcagactgccagttcaagtagacagcatcagctccaaggactgggcattgatgaacaaacatagcgttgacctttttctgtcactgaggtttaaaggcagagcctggccccagcaagctcaatagtctaccaaccatggcagttaaagagacgagtgatactatagtgagaagcagacactggagacttaatgagaattctttgagaagagaaacgtgtaacagcccagtctcatagagagcttctggcagagggttagagatgtgcataactaaattgtcttggcccctctcggccctggttctgtagggggcttccagaaactccttagttcttgaagggacaagttgttgctcagatgattattcatgcttaaggcgcagctctaccatcgtaattgcgtagggtttgtcctgtgaggatctgctgttcctgaaatccatggtaactgcagggttaggaacatttagctgaagacatttaggcacattttggagatcaggaatatgatggacattgtagtatactcacaataagaagtctcagtcactcttacctttgtgactttagctttgaagaagaatgaggtcagttaaatactgtagctttcaatcgatgtaccttgacaggttaacgggtatattaattacctccttgttgagaccaaattcctaataaaagcaatttgaggacggaaaggtttatttgggctcacagttcaagaatacagtacattgtgcaggagaaggatgacagcaagagtatgaggcagctggtcacactgcatccacagctgggacagggagaggagagtgctgatgctcagctcccttcctcctaagtgcagcatcccaccccttgagtggtaccctcaacacttagtatggaccttcccaccacaaacccagtcatgcggctcccacagacatccccagttgtttggctcctagcttattctagatcctgtcaatttaacaatggtgactactagagcatgccccaatgcatgtaaaggtaagcagatacaatgtacagtaaaaacagagatgctatgatttcatcccatttttagtgatttttagatccaactgaggagccagttctttttaataggcagtttctccatcccttcctgtgattcatcaggcttcacctcagtgggctctcattgctgattgtcttcctccaagtataacatgatcttgctagttcaaggtgtgctctgcaaactgtcagcagtaacagcatttaagactgggtaagaaatgaggctctcgggctcacttgagacctatgaataagtgaacccctagttcttatcacacatacacacagatagattgttttgtgtttcttcattttatgtgacactcatttcacagtgcttcttgtctataggatgaaatatcattgtgtatacaggacacacttttcagaagttaaattaagttataggtcatacatatagtaagatttcagaggtactttttgataggactgagtgtcactagagctgtattcctgggtctctctcatagtaaacatgaggcaagtctgaatatacataaagatgtacctttcgcaattgctgaattgctacacacattcatctgacaactaaaaagaagcaaatctactatggcaccaaagactcattggtgacattttcccccagatgttcaaaaagaaattaaggtaatccgaccacctaggaaaagaagtaaatagatatacgagggagtctcgaggtttctggatcttttttctgagtaactattttctgctctcattggtacttaaatttgctgggtaaatctttgaatgggactacatggagttgattcatccaagactatactacggagattagtggaactggtgttattccaagcagttttcctttgttttattcctggccagaataaatgaatcctaaggcatgaagagcaattttctgcccacaatgagttaatcagtaatacttaacaacccatttctactgtatagaagccataagaatggagagttccatctgcttcatcattcatgagtttgaaattacttgctaggaaagcaaattatacattattctgtttttcttgctagccacagcttaaaagacttttgctgaggaagaaaatttaccaatcacatcggtgctagggcagatctaatactgcataataagggatgctgtgtatacactcacctctctacagtttagaagaccttaaaagaatggcatcttccctgaacagttgtaagattgctttcttagtgagtttttgagctggtcttatttctcatagatcaggagttttacagtatgtggttcttgtgagtcctcgtagtccagtagatatccttactagcagcctgttagtacatttgtttgttacacataagactaagacttatttgtttacattagtagctgtgcttaatcagtccagcatcaaagggtgagcttcagtcagttgaccaaatacagagcagctcatgggtagatgatccatggagaaaaggaagccaattagagataatacataccccacgaggaaagcagtctccaggactaacatcagccaggtggggtgctagacctccacagaaaatggcacgcaggaaggggtaagtggaatagaagaggaaagccaagcttttcttagaattctcatcacagtcagataactaactcgaggtagaaacctgtcaaatgagtttgtaaatatgcttatctacattcgtcttctcattttggtattgcagtatctgaggctgcactggtagattgagaatgaaagcatagcagcttcttactgatgtatttctgaaggtttaaatcttctctgctttctcatcagtatctatgcctcttaagtcagaggagtccaatatctctctctctctctctctctctctctctctctctctctctctctctctctctctctctctctctctctggcccttagtctttgggaaaaaaaatctaatgtcagtagcttacacagaagtgaaatcacatggtcacaatcagcatctcaactcactagtaaaattaagtctggactctgaacccacttgactaatcttgttgcttggaaaggaagaaaagaacagaattaaagatgttcttatccttgtggaaactcagatggtcttgatgactaagaggactatactgatttttaaggagacattcgtgttattattttacgtaatttgcttcagagggataacctcattcttagatgtgagaggaagaagagaaggcatgttgagtccttagctggactcttaatgagaggcaactctgtcaaagtgaagtcccaagagtcttaactccaaaaatagaagcctgtagtctcatacaatcatcttcattctctcgtggatgcactctttgaatagatgccaaatgcaccattgaatgaggaaagctgggatggagttagtcagtccctagaattgcccattacccttggcatgctcacagtagtgtgtaagcactgatatgtacatcctgtagcagaaaacgcaaaaacaagaaaaccagatgactgctgagtcggaaaggttaaaagccttcttcctctttctccagcttccagaacactcctgaccacatactgtgttgcctgtgtacatgagcactcacaagctcataatcatagaagagtaagagtcaaaacattttgttgcagtctactgaactaagtgttcaaatccatcctgccacctactggactgaacccttcctccctgttagcatttcagcccttcccatgttgaggtccaaactctttgtggagaaaaaagcattgtcagaaccccacaccatagatagtacccacaagagatgcttctgattccacggactttcagagagtagctttggtcagagacatcctctcagtaaataagtagattatgtaaatggagggatggactggagagactggctgccatgaagcttcacgtgtccttctgagctggtgaggcaggagtgaggggaaggagggtgacctgaagcctgaagcctcccacagcagagggatagaaggctagtctagaagctagaagcacacagtgacacctgagcatctccaaagtcacaaagcagttcttcctctaatctttacgtatcagaagtaaaattcaaaccctataatgctttacggtttatcacacacttgtatttatatcatgtatttgtgtcatgtcctcaaaatcagtgcactgactttcctaatgtaatacttgcttcaagcttgagtttattaacaaaacttaagggtatcaaaagattctattataaatttttaaaattggcaaagcctatatggtcatacatagaccttataatcttaattatggtcttctttttactacaaaataaagtgcccaaacatcccaagccccagttaaatgtctgatgtgcagtcacgtaagaaattagggaagtagatttcttttcacaagtaagtgctgtccctccatcgtttccagcctcattctaattggtctgtgtgcttccctatgtctgcttttgccatttgagttttagttacatgctatgtatttgaaaacttcatctttggatttaatgtttagaaaactaagcttaactacagagtatctgtaatagaatagttggactgtcatcatcatttccctaagctctgccaataggtaatttctgaatttctaaagttagtaaaagatgccccatattagagtagaaggtggagatcaaaatgagacaattaaatgaactcagactcataaagaatttgcaacactagaaaggagatcttcatttggaaaagtttcaaccaacactagtattgtagtaagaaaagagacggagaaacacagcctctgactcagcatcacctagtgccctgctcgtgtatttcatgggcttgtatttaaccatggcttatgtgaaattgtctaggaagcattttttttctcaatttgttgtctccttttactaggatttcttttgaccagatatatgtgcgggggaggggtgtaggggagaggagaatggaaacacacagcaagagaatataaatcattttgtcttaaacataatttagaaagagaaattactttggttatttgcttttattcagttagtaggaatcccaaaatgtatagaggcaattaaataaataaaacgaaagataattttgactaaggtatggaatttacttttctattgtaaactaatcaaattgtgtatttttttaaatgagagattgcaatttgcagaaaggtgcatatactagacattaattaatatggcataaaattactcagttcaggattcagaaaccaagctatgaaagtatcgttggaatataggatttggtgaggcttttccattgtgttgataaaaatacatgtattgtgtcaggttcaagataaaatacagttggcttaaattttgcaagttagttttgagaccagtcttaacaatttgtttgtttgtagtaattctatgatgagttcagattgtcctaaagctgaaaggaagatatcagttactaggtaaagcatttttcagtaatagtaaggcattgaagttgtttgaagtaaatgaaagaagctgtttgttgagtgcaaaatactagctaatggtggacttggagtgcagagtcaggttataaagactgcttaccttgagtgaatctggtaaatctggggctgggggatggcgttagttaatcagtcagtcaattaattcagaggagcctggttctcttgtggaggatctggatttggttccaacactcatcagatgtctccaaaccacccagagctccagagccaccagattcaaagaccctggcctcctgggcacctgctctcaggtacatgttcacacacgcacgcacgcacgcacgcaataaaatttttttttaatctttgaagtatacgcttcgtatagaacagatttacaaacgttatgatgcaaaaagaagcaccgtgtatatacataagaaaaggggttcttgtgcttctttgtgggttagcatatggcagaagttccaaaaagaaagcatcaaccagcttgaatgaaagagaaccactgtattgcaatgagaaccaagctggcaagagtgccctgggttgaagtgtgcagtgccctgcaatccaggccaaagagctaggaatcagattagaagatgcttggtgttgagcaaaggaaaactagacctaagcttcaagagaattcagacagcagtggtatagaaaacagtttggcaggcagaaaccagaacagctgaggaagacacggacagcattcagactggcagaagtgaagaccagcctaagctaatggctgtggaaataggaagaagtgtgacaagagataaagtgagtaaaaatgggcccgagctggaaactccaagagaagaaaattaagcatatttaagtgttcaatacatagtgttctgtggtgaggtttatgccggggccagaggagggcactccacgagcagcagtctcagtgcagtacctaggtttcctctggccactaaagcttaagtctagttggacaggtttctctttccaaaactgtttcctgtgaagataaagcaatgatgtgtctttaaaagtctgcataaagatttctctgggaagcaattcaagaaatcactactaaggacgcgaaacaccagtgaaaatgtttgagacattccaggtgaggagactctccagcttttacactaagagaaaacgcaggcagaggggtgcaggtgactgcatggtgacctctgtcctgtgtgcaggcctctgttcatcccagctctggagatggcgaactgacaaacctgaaagcacctaagcctggggacagagcaaggccacatatgatcattatggacagagactaatagcaataagacaatttattttaaaactagactcatttaaggtatgagagtatactaaatttatggtatatgggatttcatagtagaagtgtacacacactagcaggtcattgagctactccttaatggccaggtaaggcattactgtttctgtgtatgccattgctccactgaacatcatgtctaacttagcatctgtttagtatctggacaaatgactgttggagcatcattgctgactttggaagactgttcaacaataaaaagaaatagtaagaaaggttattcgtgaatttccacgtcgtcatcagaaaggacccctttctcttgatgttgggtcattaatcagcagtggttttgatctccaggctgtcactcaagatttttgtactcttttggtctaatagtagctgctgtgtctttaatctcagcagcactgtaaatcttagtttttctcatgttgaattcccacatttattcccattttcaaatggtttcatacctttaagtttatttttgtttgggagggggattgttttgtttttatctttcatgcatgtatatcttaagaaaactaagtacagtcttagcacgttttgcttgtaattagtagtacagttgtctagaccagatatttatatcacagagatacagtgtcaagttgcaaaggaccaaaatgttacccaagaaatgtgtactcagtaagtgctaagcacagtaacagcagtgccttttgccaaagaaatcaccatgtttatgaaacatatctgttaagagagttaaaaatggcctaggggtgatagagattgctcagtggttaagagcacttgctgctcttgcagaaaacccaggtttggttcctaataaccacatcacagttcacaattatctatagctccagttccagggaattggtatcctctttggtctctgggggtaccaggcatggatgttgtatgcatacataaatgcaggcaaatagtcattaatacacatagaagaaaaataaaccagtttttttttttaagtaacattggtttgcctttatcactaatatgtcaaagaagccaggcatgtttgatttggaaggcaaagtcaggcagatctgagttcaaggccaggcaggtctatagagtgtgttccagggcagtcaggactacacagagaaacttttaaaaaggaaggaagggagggagggagagagggaaagagagggggcagaatgaaaggaaaggagaaaggaaaggagaggagaggagaggagaggagaggagaggagaggagaggagaggagaggagaggaggaagaagaggagaggagaaaggaaaggagagaggagaaaggaaaggagagagggagaaaggagaggagaggagaggagaaaggaaaggagagaggagaaaggaaatgagaggagagaggagaaaggaaaggagaggagagaggagaaaggaaaggaaaggagagaggagaaaggaaaggagaggagagaggggaaaggaaagggaagggaagggaagggaagggaagggaagggaagggaagggaagggaaaggaaaaaacattacctgttttaaatagcactttttttgaaagtttttttttaatggcctattctacctctttcaaaattattcatttttcttcttattttaggaacaaataaagcaaagtggaagcttgtgtttttatctagtatgaaaacagaatctaatcacagctaatgagtataatacatgctcgtgtgtatctctcttgtttggtgtgcattttatacacagaaggtagcatgggctgaataactagggtgccaagttacagatggggttggaaatgttatttgacagccgattagagtaatctgtcagaaatgatgacttaatcaccataacagactccaaattccctcatagaattctacccagagtaatctaattttcttgccatattttattttccattttgccaagactaaatagtcatactgcttgttttatcccctttactacactgcattattctagcagaaatattaataggtcatgtcattgtgacttgaaaggcagaattggagcccactaagccaaaagcagacacggaattctgagttctctgtgttttctatcaccgtgttgttattgtgtatcaaaaagctcagagttgaacattgcttcccaaggaccagaaaaggccattctttatagtgtattcttttagctttcaaatggacccttacaaaactcctcagggcaagttctgtgtaaaaatgatcataataactttattggacactttacatagctcaatggctctgagaaagaaatcataatttttttcactgagtttttctccagttgtgatttgccatgggaagaaaattttatgtcatagttcttgttactatccattcaaataagctcctcttttttctgggcttagaacacatatataaaagtgtgccagcaaacagtgattgagaattccccgtgtacccactatggtgacgcagtcatagtgctccagaagagcgatgaggaatggccatgtggctgagggtgggtgagtctgcactctgctcttccacgaatgtgatctgcagaaggtgacctctttctgtagagtttataaagaatggttggaacaactgtgataacaagtaaactaagtagttaacatagccttagtatgagtataatggcttacgtattggaaagttgttcatacactgattgattttaaagatttcaactagagataatcatactaagtgaattaaggcaatctcagaaagacattttaatgtgttcatttgtattttctagaatgttcatacatacagaaaactacatgtgtatggaatagaggttatgggctcttgccacagatagacatgagtgaacattctgacccctgtgtattggctgtgtgactttgccagtgtatttttccctgccctcttgattcttctaaatatcaacttgacagggccattgagaaaaataactggctaacttacaagaaacctgtaacgcatgcctgaaaaattaagagtgaaaagatgacttcctctgttttcataattgataaatattgattaatgtcagtaatcaatattttgttttgactgatctgagaaattctttttgtcatgtgttcctactgagcagtcattcttgtaactatatcttagctggtttacgactggaagaaaagcaagtgcagaggttcctgctcagcgatgataagttgatggttccagagacacccttggtgctcatctcctaatgcagagcatgatgtcacagtaactagaaggatgccagtacataaagtagcaagacgagataactgtgtgctgtcttgctctcagagtcatccatttcagagaattgcctacctacagttggtggcaactctctcacaacttatcattcacaaattcacttttataaaaactctgatagtatagtatagttgcatttgtctcatagttattatacaaacaagataccaagtaccctacataaatcattttttttgttgttgttgtcatggagtgacataaacatgctagtgttttggttttggttttggtttttacaaactggaaccttttcgttctcattgaacatggagctctttcatagatttgcctgtttcactcccctctttctttacttttaaagattttgttacagtaagcatattataatatatgccagcatagctggtctatatgaagctattgtaatagctttaataatgagactataacgggacttttgaaaatctatttcaggtttgcaatggcatttttaatatcttgtgtgagaggtgattacttcatcagttggtgatgaacttgagttctcctctgtgtaagaactcatccaagctatggtctcactgtcctctgacttccttagtgataggtggtataactcatagtcttcctgtaggcacactggaactgcgcacacaggttaggttagaggagccatggtctaggctcctccacaatgtactttctaaacaccggtcactcattttcattttcgtcacccacagctggctgcttctgtgatgaacctaaaacactttcgggggtggaccgtagctgttccaatcaggaaattgccattctgggcaccagtagtagacagatcagttctaggtcgctttgtatatatgaagggaaaagaggaaagtgagcaccttgtactgacccattaagaggaggggtcaaagtggggaggcttgatgcaggaatcctgtgtactgcagcaccagtcagggtgcatcatacagaacaggctgtatgttgtagatggtgcagagtcgtagctttaggggagaaaagatggtgatgtatgaatttgttctcacttgaagttaagcagctccacataagcatcccttagtgtgctgaagtaagatctgttgctttgcattgttctgctttgactaatatatgatgctagtagttgattgtaactgaaatgacacttagaactacccaaaccccagtgaaaaaacgaggaagagagctattaaattttcccttttcattatgttccatttgattcaaaacagataaagctaaataaagaccaagaaactagccagcaagtgtaactgtgggcaaaatgttgttattccatagtgaatgaatagaaggttcctatagatcagcaatatgaactaaacagaacagtgtctctagtagcatatgtagcagaagatggcctagttgcccatcaatgggaggagaggcccttggtcttgcgaagatcatatgccccagtacaagggaatgccagggccaggaagcaggagtgggtgggttggggagcagggcagggggagtgtataggagactttcaggatagcacttgaaatgtaaatgaagaaaatatctaataaaaaagggaatataaaaaaatctataggagtacaaatctagtcagctttgttcatagaaatgccaacctaacgtatgttaggtccactgcacacctctgagcagtgtctgtctgtaaggatcttaggtccactgcactcctgtgaaccctgtctggtgtaaagctagcacctatcacttttctcatgaaagcaagctctccacagagaggagtgtgggttttctgtttgctcccaagacacctgagtcaaacacaagctgtggacgcattactccctgtttcatcacaactcagaaaaactcccctctacatgccagagactggtgtttctaaacttgatagattgatcagaaattcaggcagattgtgacagtgtagacaggtcactgaatatgtccctccaacaaggccagttttatgtgattgtgaagacaaactccttgttctccccacctctggaaaatcttgacaatcctatgtgctcacttgctgctaagaactggatgtagttcagactggaattccttacaactgctgagacattagacactgaaatggagactggcaagttctctgagccttttctactctgatggcattagtcagaacttccaggtgcagtgcataacatggaagtctctcactggaccactccagcctaggcagcaggttccatagtcaggttggaaggtgttaggaagcagcgtactgtcaacactggtttcatcttcagctcttttggggggggggggtggacacttgactgctgctctgttttattttcttggacaagacacttgtttgtttttttaatgcaaaaatgcttttttaaaaatttatttttttacactccatattccattctcccccccccatccaccctccaactactcnnnnnnnnnnnnnnnnnnnnatccaccctccaactactcccacatccccacacctcctccccacaccccctgtctccatgtggatgtccccatcccccaccccacctgacctctaaactccctggggcctccagtctcttgagggttaggcgcatcatctctgaatgtacacagacccagaagccctctactgtcagctcttaagaaaggtgctgaggatgtgacttctagctgccaatcctagtgatgaggccagttttagttcatggttgagtagtcaaatcatttgcttccttggaacgtattcatgaatacgtccttctttccttgtcatactaggcttcagctactttgatcatagtgagtggtcttctttcttttaagaactcctgttgctttgatcaaaaagtctataataaccattctataatagcatggtttgcttagaatgtcatagcgtcattctataagaatgcatctcattttcacttgctttgtgcctttgcatatgagttctcttctttgagatgtcattcctccagcttttgatagtactaggaaataatgcacggacttcatgcttacttcttaggtgctccaccgctaacctgtatcactagtcttctttgacttttcaacatggttttacaaagttgctcaggttggctgtgtaccaagtctatagcctaggcagactttaaactcacaatccttgtaccataggctcagcaagaatgtattcaagaagcaacatcttaagacaccatattcaattcctgcttccttagtctgtatttggcatttctgagttcccatattgtcttagctcagcacatactccgctctagaaaactgttgatggatctgtctcagtgtcctctacatggtccatcatgacagaccctttcatttccttcatcttacagaatgtatgaaaatgagcagttcttaacatagtactgattaaagacctttctcaaaagttgcagtactttacacactttgtccacattctcttcagaatgtacccaagtagaccacccactcaagacttcaccatagtaacagcccaggcttctgtggatgggatgttaccccctggacctaataaagaataaaacagagtccgggcctatagtggcagtggctgctttactatggctgccattacctttagatattctaaggtcagatactgtccagctgcaggaagatgaggaatgaagaattactgtcctactctactagtcataaagctacagagaccaagtgctgtgggagtttaaaagaggagaagactttcacctaagggtgtgtttcaggctcctttgtgggaacgtttgccagcgctggtgagtaaagcctggagttcttagttaaaagcccatatgtccaagtcccgtggtagacattcagtgaagaggcagtgtggtctggagagtcatcactggattaaaagcagggagattagacttctgatcccagctctgtcattaaccagctgtgtgtctttagtgaagacccttgttcttcataactgcaactgagagcagctttagaataaaaagatgctgctcctatggctcccagatctctcctctagtgtattgtgtatgtcacagataaggctacaaggcgtagcacttaggcctgacgctcacaacacctgatgcttttctggtgtttgtcacttccttttataaaatgtgcgtatcagtcacaacagtggacagtaggtgtcgtaagggcaagagctgcattcatttcatctttacgtttccatacaacatgtacatataaacacttccatctcttgtgtctttaaactgtaaatctcacatgactttgcagtatattaacccatatcattctttattgtcttgaaagggaaaggtgccatcttccactgtttgcatctatcaagattcgtatcttcatccctttgtaactatgagaagcagtagtcttcatttatcacatgcactgttgtcttccccgtcactcacttctctgtttaccagaacctgcatttggcaccactatcttactgccttgaataagaatccctaaataaagctttctttacttttactgtctgtgtatgaaggtcttacctgcatgtatgcatatgcaccatgtgcatgtagtgcctccaaaggacagaaagttcccctagagttaaagccagtgtgagccaccatgtaggtactgtgacctgaatctgggtcctctgcaagaagagtcggtgctcttagccactgagacatctctccactccaaagtcctcattcttggaactccccatcatggccccctgcccttctgccagctccttgctctgtcctctcaagatattgtcttcctgacgtataccctcagtggttctgtcctggctgctggctcttgttagtccatcaattcctgggatttccactgctgcctcccatactgaatcctttgtcaagcttgagccctgcagttccaacatcttgttagccatagtcatatcaaatttagcgtatttaggctggcattcattcctctgacatgattcctctaatttttcctaattgatcaatgactctttgatctggatggctgtctgtgtgtggagttcttctacctcaatccccaaaagagccagttagcactgaattttataacttcataatattactggggctatttactagctgccatcctgactcctgtgtcttttatgtaatccatcctcaatggtatcaccaaactgaatttttttttctaaactcaaaattctgcccagttgcctttactgcttaaatctcgtattcccccaatacacttcacaaaccatcaatttcttagcttacaagatcctctaagacctggatgctaaccactctcacagcctcctgctgccctttaagacctggatgctgaccaccctcacagcctgctgctgccctctaagacctggatgctaaccaccctggcagccttacactacccattttgctggcatgataaactccttttggaaagaaatatattcactttttagtttctttattgactatatagatttttttctccatataatatattctggctatggtttccagttcctgcctatattaccttccatccagatctacctcctttctctttccttgagaggtgggggacaggcatttaagggataataataaaataaaataaaatagcaaaatgaaataggacaaaaaatggacaaacggaagaaagccaaagaaaaagcacgagaaacacttatagaatcagaaagacacacgttagtagacacaagaataccataaaaacacaaaaccagaagccataatatgtacacaaatgacctgtaaggttgaaaaagattccctgataaaacatgagacaaagaacttccaaaggtgccattgacttatgtgttggctatctactgctggccatgggtcctaccattaagtgtggattgtatcccaaacagtgatgttgtttagggaaaaaacaaaacaaaaaaaaaataaaaaacaaaacaaagctaaaaacacagaaacaaaacagagcagagcccactggcagtaaaatgactcctgatggatcctaatggcattctgtactcgcaaatcagtgccttgctcagccatcatcagggaagctgcctcctgcagcacatgggacaaacataggtcctacagccagacagtatgcagacagtgagagaccttggaacacttgaccttaattgtatgtgtccctccagtaaaaggagacagaaagcatgtaagagccagagggaatggagacaccaagaaaacaaggcctctaaatcaacatgataaatgcacaaatgaactcacagagattggagcaactaccatatatggagtctgcctgggtctgcaccaaatggggccatagagatgaaagaagtagtaggctaacaaccgtccactcctaaactagtactctccaatatagaaccacttgcaaatgaacatttagtttcctccctcccagggaatctcactggagaaacaaactactctattattattattattattattattattattattattttacataccaatcacagtttcctctccctcctctcctttcagtcccttcccccatgacccattctccaccctccacccacccctcacatctactcctccatttctctttagagaagggcagaccttcctatggatgtcaagcagccctagagtctcaagttacagtgagagtagatgcatgctctcctagtaaggctagacaagataacccagtaggagaaaagggtcccaaaggccggtgaccgagagacagcctctgctcccactattaggagtcccacacaaagaccaagatacacaactgtaacatgtgtgaaagacctaggtcagtcccgtgcatgcttcctgattggtggtctagtctctgagagcacctatgggcccagattgattggttctgtaggtttcttgtggtatccttgatccctctggcttctgcaatccttcttccccccctcttgcacaggattccctaaactgcttaatattcagctgtggggttctacatcggattccatcatttgcttggtaaagcctctctgatgacaattgagttaggcaccaatctatgaatagcagaatagtattaggaatcattacattgtctttttttgtttgtttttctttttgccagtcatgtttggttctatcctaggtctctgaaatatccagcctctggttcctgaccatcggggcagtgtaagggatggtctgtctgtctgtctctcattcattctctctctctctctctctctctctctctctctctctctctctctctctctctctctgcgttggtctcaagctggcctagtcattgattggtgtcttagtcggggtttctattcctgtacaaacatcatgtccaagaagcaaattggggagtaaagggtttattcagcttacactttccacattgctgtcatcaccaaaggatgtcaggactggaactcaagcaggtcaggaagcaggagctgatgcagaggccgtggagggatattacttactggcttgcttcccctggatttctcagcctgctttcttatagaacccaacactaccagcccagggatggaactactcaaaaggggcctctccccccttgattgccagttgagaaaatgccttacagctggatctcatggaggcattttctctctttttttttttttttttttttttggtttggtttttcaggacagggtttctctgtatagccttggctatcctggaactcactttgtagaccaggctggcctcgaactcagaaatccacctgcctctgcctctcaagtgctgggattaaaggtgtgcgccaccacgcccgcccggctttctttttttttttttttttttttttttttggcattttctcaagtgaagctactttctctgtgataactccagcctatatcaagttgacacaaaactagccagtacagttggccatttcctcaactactgtaccatctttaactcagcacatcttgtaggcaagacatattgtaggtcaaaggttgtgtggttgagttggtgtcccagtcttgcctgttacagagtatggcctattcagactccgtgtcccccattactaggagtctttgctagagtcacccttgtaaattcccttataaatttccattaacctaggtttcaagatcatctcagaaatgtcccccaataacagttgtctttcccaatactctttccctcattctcctctcacctgatcccatccccaacctgccctcatccaggtcccttgacctactcttaagggtgggttatacctccatcagtagagaaatggccaatagaagaagaactcaaaggcatctctggagggtccttgtttcaacatgttatctcagggcttttttctcttttaatttaattttatttttaaattttagcttattcatatattttcccttatctttgtaccctatagatcctttgcatgtgtattatggctttcagtttagtgtttttatagggttccagagtgtgcaaatgactgggtctttaattcctgtaccttcttttgggctcttttctttctgttggttttatccaattccaatgtgttagtttttgtttttatcttattatactttatttattttattttattattgttccttagaagcctgttggtttcctaacgagacagaaagggagtagagccagatggcaggagaggagctggaaggagcagagggataggaaaccatagtcaagatatattgtgtgagaaaaaaaatcctctactttcagtaaaatcaggggaaagagttgtttggcttgtatccccattgagattccattgaagaaaacaaatttctcatttgcaagtggttatcagttggagatagcttctgggttagggatgggagctggtgtccacatctctcagcactgggaccacatgtggtgcagaccagagcaggccctgtgcgtgctgccacagtctttgagttcctacgtgttggttctgctgtttttaaaagacctcgtttccgtggtgtccttcatcccctctggttcttacactctttctgcctcctattctaatagtccaatgagctctgagaggagagatttgatgctgccatccctttagaactgagtatttcaaggtctctcactctgcaaattgtatgactgtggttctctatctttgttccctactactgcaggaggaagcttctctaatgatggctgggcaaagccctgatctatgagtagagcagaatgcattaggagtcattaggttttcccataggtccctggcctaccttgtctcaggttcttggccaactgagcagtgtcatatacagcttcacttttaccattgtgtcattgctgggacatccataggtttgacaagccatcttctctcttctgctagcaagtctgagatctggaactagataccatgattgctaggaaactttctctttcttaactgtgtgtttcctctcctccagcacttagcatttgctctgctgtttgccagccatatagcacctgaggggaaaaacttctttcaaggcctttgctagctaactggctatagcctggagcctaatacaagaagaccatgcttgctaagtgtgtgggcagatggaagcaaagggtaacctactcaaaggctctgttgatcatccttaaaccttgttctctcctgatttcgtggccacaccagaacttcctacagttttcttctgtggtattttttaggactatttaggacacctgaacattacatcctcaagtagtgtctgctctacaaattaactatatgaatgtatggagtggagatgctagtaggtgctgcatctcaaggccatgctctatggataaaaacatcctgtctataaaggcatacaggcagctctaaattacttagggtcttatcccttggcagttctttcttactgtcttcttcccttgtattctaaagacactggtgggcatttggtgcacatggactgcctgataataatgtccctatcacataagtgccataactaagtaccatttcctttcatttaaattagataaaacccagagctgtggcttgcaagtaatggaagtccactggggaaattaaaagttcacaaagagcagacccattataataaaagcatttgcacagccagtgattccatccatcctggggcttccttattccttggagtaagatgaaatatcaaataagaggacctttggaaatactttgaggaatttagtttaattggaaatagtgggagcattccatgattagagtaaactctgggtcatacacagcggtgttatcagctttgtagaacgaaccatgaagcatccatgtctgccatggttcggatctcagcctcatttgtttcaagttttttgtcttctgcatatatgctaactgtacttctaaggctcgtgtctctctccttcccttgctcctgtctttctctcctgtatcccaatggttctattatttagtggtaactaaatcaagccacttgaagaccttcatgtcatttctattgagacctgaggtaaacccaaaaagcaaacagagtaggtggtagacaacagaaatatcatcctgtaagtagaacagccataattctaacgtcctcagcacatccctctgtatctgctcatgtataagcacttcacatgtgtgctcttgtttaaccctcatgggcctgctctgtgggtgccatccaataccatcacagatgaggaggctacactagagaacccccactagcccaggttactgtaatagatttcagatagaattacctataatgtagaggtagaggttatagttaacacaaagccaggtttccagttccaaagctcaagctcctaagtacgattccactgttcccggcttgaaggttaggttcctgaacataaaactgaggacacagacaaaggtaatatcaccccttaaaggccatggtattaatgacgtatctttgtacttatagcagtacttgaataatatcacatttctgaaactggttttacagttgttcaatctgcctttactttctcacttttatatttttagatgcatcatcccattcagatgaaacctgcagatagtgaaaagtcaaacggtaggtgtcgaccaactgtctgattgaatagtgcctgctactttagattacttcaggttggggagggggccagctctagctgttgttccctctggaaggtggacagctactggactcagcacatatggagaagactgtggcaagggataatcctccacgaccttctgcttaggccttgctctatgtggtggccttgtgggatctggctagtattggcgtactcctggtacaacacagaaacacctaatgggtgggaagaacgtgagtggaaagtaagtagcccataaagaacaggctaccattttttgtctctcattgctcctctttgactgtcgtatattcttctctaaactgtaccaatacatttgcatcaggatccattcagaattaagtctgctgattaaatgaacatacatttgcagaataaatgtgtatttgatgagatctataataaaattgagattcgcctcttcaaggcacttcagagttggtagtccatatttttatcaagtttttgctcccgtctctataagcctcctatcaaggttttgttctttttaactttctaaaatgtattttcaaaagaaccatccactgtcgtggaccacagagcttctctgtcccctaggactgatataatcagccctgtttccttccagcaggcagcttcgcacctcattaattagtaatcagggcagaagccatgcacttagagatctatatatctgcaaatgtaaattatgattgggctcagagtctctccacgaggtagtttatggctaattgcagtgcatcccattttctggcttcttcacagactggaaagttgggaagagaactcccaatctgtcccaagggctgccaacactggtttgtcagacaggacttattctcggtcacttaccctcttctgagcagatgctgttgcttttccctacctcccacgactgtccagtctccttcctatactgttatagtgtaaacaatggtgtttatcacaagaaaatacaaaagactaccacttctttgtgtgagaccatgatcagattcctaagttccttcctcccttccttagctactcatatatcatttactgtgtaccaggaaagatgtctagggaatagcattgcaacagtaaatatgaagaaaagaaaagaaaagaaaagactatgaccctgacaggaaactttattcattttaatgacttaatacctaattatagtccttaaacatggaaatttgcatctgctcattcataaaaagggaatagtggtaactactgccttatggcttggctttttgtttcctcttgagtctcaaaataagatgtttgcaacagtctttataaatgatggggacaccttggttgttttttgttgttgttgtcttttggttggttggttggtttgtttgtttgtttgttttgagacaggatctttctgtgtactcctacctgtcctggaacttgctctatagaccaacctagcctcaaactcagagatctgcctctgcctcccaaatgctaggattagaggcttgcaccaccatggcccagatgacagaacacatattaaagtgttaattacctcccagagatatgcctcggctgtatatcattctttgctgagcacaccttcctctaaaggtagccatttctgccccagacattcccatatactcttctacccttaatagtaaacagatgaatcatgtgggacaaatcctgtcagtttatgtcttcatggagtttctagccaccaagagatgctctgcctatcctttgactccagacttctctaaattattttgaagcaaaagtcatggaatgaaagtctgttgaaaggggtctgtcttatttttttagctttaggttgtatttataaactcacgaatcatatatttgaggttgagcacataggaccataaatgcgcagcacttatggtatattttcttctcagtattgtctgctgttcctgccaagagtcctcagtgattgcgctgtttttattctccagtgtcaaccctggacacagtatttgcttaagtctaaaactactgcagaaatttttcatgatctcaaaagctgaggaggacttgggtttccttattactacagtaaaaagcatcttaaaatgccccttttgaagcaattgtacagggcagtaataagcaagcttcaacatgtaccaagtaatcaaatgaatgagcctagggggtgttttgtactcacatcaccacattcataaaatgtatgtaatccgctcccagaagtccttcaagtttcaaccttgctcagaagttcaaagtgtgttttgaatatcaaggcaatctcttaactgtgaccccgcccccttcaaacttaaacagagagggaggagggggaacatagtaaggaaatactagatcaaagcaagactaaaacgcatcagggaaaatgccacctcctacgcctccgtgtctactacctagggcttgtgattgaaatggctcaggtgtctaaggcttgcagctttactggctgtaacatgcatctctttgcaagctgattcttctccatatatttaactctgcttgggagatgtctcatctccaacatcttttagtcttcactacaaccaggcttcactttcacggcttcatggaatggcctctcgtggccttttcacagactccacatgttgcctggcctcaattgctctctaaaattatggagaatgaccttagttactctttaaaactatggagaaagagtgtacgaccccctccctcctgaatctttcaaatccagtaccgtctggattaactgccagcttaagatagacctttgtcccaccttctgcattgtcagtatcttttctgtgttgaagcacttgctgtctatggggcaagcaatccttaggccctctcctttcacaagctggaatcttagttgggtggaatctgtttctgacatcatcctccttcttattgttccagtacagagcaggaggcctccctttcatggccttactctcctgaacaatcagtctctcttatagcacacgccttagctgaaacattaagcttcctagtgctctgtttctatccaagctatatatgctttctttcttgctgccccatttgttcttttgtattgtaggactccataagaggttttagtgattgccaggccgcagatgcaacattgtgctgatttgacattttctctaccaaagaaattaggcgtatgtttgtttgtttgtttgttttggagacagagtctctctgtgtgaccctggttgttctggaattcactacatagaccaggctggcttccaactcacagatacatcagcttctgccttctaaatgctgggattaaagacctagcagtccatttcttttcaatttagcctcacacagattctcaggagatagacagaaaacagccagattctttgccaaaatatcatagaagcaatggcctgtagctgtgttgctaaagttgttacccctgtggggcctctggagccaggtctttactatctcagcacttctggcttcacagacccattagaacatacaacatttacctactttcctagtccaagtttcaaagtcttccgatcactccaaaaagcaacatgcccacgttcttctcaaaaacaatactctctggtaccaatttctgtgttggttacttttctgttgctctgaaaaaaagaagaagaagaaagcatgactaaaggcaacttaaggatgaaagggtttatttgggcttatagtttcaggggaggcatggtggcatgagaccagagcaggaagctgagagagagagcaagtctcaagccctcaaccacacataggaaacacagtgccctggaagtgaggtggggctgtagagaccctcagagctcacctctagtaacatgcttcctccagtaagactcctaaaggttccagaaccttctccaaaagtaccaggtttcctagaggggaaatttatcaaacacaccaccacagagaaataatgtttgctgggttatactaatggcaaattagcagcatagtccacaaactgggagaaacattttgttgccttctaaatggccctggcctgtcacacccatactctttacatgacagaataggcctatacacagactgagaacccacaaacctacacatagggtgagttctcctttgccttgattttctgaattttttttattagaaaagtcaaaaacatgagagcagatttacaactatatttcaagaactctattatgggagttcaaatggaactttgtcttgcatagatatgaacaactcatagttccctttggacctaacttaggaatcagaagaaatgcacacttttctaactcgtaagtgttgcagtcttttctgattgctcatgccatttctgacaggtaagcatacttcagaaacataaaaaaaacacaaatatttttttggttcaggctctctgaatagctcctatagcagtgaaagaagtataacgagctctaattgcacttgtattgagtttgctgacatttatgtatagcacaaagaactcatcacagctagagagttgctgtcttcattatctgtgctgagattttgaaattttctattttctgagcaaggattgctaatcaagatcactgagttatgggcaagtgaattccagcaaaacagtccccattgaatccctagccactacagcctgatatagggaatctttagtgagcccagaaatgttagatccttgtacatcagccctgcacttttggatcttactgaatggacttcttaaacctgtaatccttactataacccatcaccctttaaaagctgtcattaaatctgcatcctccagaactcctgagactaaaccaccaaccaaagagtacacatggctccagctgcatgtgtagcagaggatggccttatctggtttcaatgggaggggtggcccttgatcctgtggaggctcaatgcccagcataggggaatgctagggcagtgaggcaggagtgggtggaagggtggggaagcaccctcatagaagcagggggagggggggatagtggattagtggaggggaaacctgggaggaggataacatttgaaatataaataaagtaactgaaagaaaataaataaatctgcatcctctcttacattcatgctaatccttgcttttttttctgtgctgctatcccaaatatccaaagagagaaaaaaaatactactccagataagtaataattgatggtgtacctaatgtgaacactttaacaggattcagctttcttgttagtttcctactatagaaaactgaacaatcatatgggaagtgtgtctgaggagttatggataaaagggctttcattaactagcagaagcacagttactttcttccattctgtataccgtatatttttctgcaccatgcagctttccctcttcagtcagctctcagtcctcttactatgaagtagaaggtatcatctgtgcaagacttcaacacagctgctgaaggtagtgatgcgatgagggagggagagctgaagcaggagctcgcctcttgtgctgtgcttggctctcattggctacagccagtattgactgttgccatgctcctgatttcaaggaagatgctctacagagagaacacataacaccttctgtattagccttccaatcttacaatgtgttgagggacctagaatccaaaaatgctaatcaagacctgtcctttttctcaaggctctgaaacctatgtgcctttttgtcaagcttagagctagttgaagtcatggtaactattttcatgggaaggtgaaaaccttcaaagccaccattaaaaatagaaatcactcagtattttcatgcactcactttccgatttaccagaagatgggaaaataattttgaaattcaaagtggaaccacttgaagatttggaggcagtaattaaatgccatatgttagcaccaacacattggaaagttgttaattaattcaagcagcccaaatccaggtgtgacattgacagattgtataccagggtgttagcacagacttacaattagggatgttttaaaaatgaagtttctagacctctaacttaaagaagttacccttttactcaaaatattaaccctttctcattctcccatgagagaagatgttttattgagcacctgcctggagaatgtggttctgttgttatctatgaggtaggcagcactccatatgtgaaagtcaatccctgctcagctcattagcatccttgggaaaaatggttttgccccaaagagaagggaacttacttttgtttttaaattcccctaaagcacctaccagactaccctggataccatagattgatttaagcaatccataatctcattgattaaaaattaaatactagcctaacacagagaaaaagaaatgaacatttttgctagcatgcagaggcccctcccctctttttagctaatgttattttaaagaagggttgtcttcttccttgaaatttggttgagtttattcttagtggtacccagaagtcaacatcgtctctgaagtgatttccattttcagagtcctcatcttaccaagggggtgtcctatgttagcttactcgggatctgcatgtgcatttactatggtacttctctggaacccaaaatatacaaatagttttagctaaacactgtaattacaagtttggcagtgaaattagaaaccaaataaaaaattttgattctgcttttattttaaagaactaaagcaagtttcttcaaggtaagaaatatgacaggattttttttttttcatacagctgccagccatagttgggtaggcataggagtcctgagcagaaaataataaaaattggagactaatagtcattcccttccttctccatccatttacacatctccgtcatgggggagggaggttgccacctccttacagggtctactgcccataatgctctgtattcaggggccagctcacaggtagcctatgatcaatcgtaccggtcaggagactataaagactccttgtaaagagatctgaggttgctgaagcttggtgccctggaccactaggtttttgctaaatcgcagtagatcactggtatttcacttcttccaaaggtataaaaagaacagtacttaaacgtttttatccaaataaacaatccaaataaatagcccatccgtttaagtctatcactctccttatcgctgagctcattctctgatcataagatttgttttctttttccgatgtgccagtgtgttcttgactctgtccctcatatgttcagcaccttctttccccgctccactccatgtgtctccagattctgctttacttcctaagtgtcctctcaggaggacattaaaggatccctagacctctgcgttgtcttagaaagtgcctggtgtaagagggaggggcattgtgcacactgctctagcaccccagttcttccgtctgtccgttaactgaagcatgaagcctgttgccttctcggcagtgctaagaaaaaagaaagtaaaggaagcttagctgacaaaggtgagatgattagcaggactacattacaaatcaatgacaatactaaacagagagcaagactcctttagtcataatcattccttctgcctgtaaggctcatctacctcctccagcttgggagaatcagtgaaggaacaagaaccctgggtgggggtaggaacgtaggatgtgtccatattagatcacatacttcctaaatgaccctaggaaagttgctttccctcttaaggactcagaatctgttttatagacagatggaataagtcctcttcttattacatggaattctaggacacagaacatctaacttcttcatttaacttcttcagagctgcacttaccaatataatacatatgaaaggctttgaaattttaaattaaaatgatatagcattaaaaagtctgtttctcaatcatcctagacccttttaaatgttctgagaagtcatgcacatggcactggctgcatatggggcagcacagacataggacttgggctcagtgttgcttaagaggaagtcactgagttgcagcggtcccagaggcctcctgtccatgccttaacctgagttccagtggaccagcacccagaaaatccacagaaacaataactgttcacatggaaatgtgacctgccctacacaggctaaaagaaaccaaagtagctgtcacttttaaacagcaatggcaagatgatggtgtagcctcagtaacaaaggctatgcacacactgactaatccaggtctctagtatggccatctctctcctccctgacccacacttaattctgagaaacagataaagtgaagcaggaagataaacaggtcttatctcgaggggcatctcagacatcttttacaagggcctttcttagaaaggctgtaagcactgtcctgaaatcagttgtaatttggccttataggagatatatatattttccctccttgctcttctgttttgggtttgcccctaccagagatgattctcagggaacgacaattttctcctctagaaaagtcaacttgtgcttcaggtgtaagcagtctgactagttagacgctaaacagattgttgttgaggtcagaatggaaaagaggcgagaatggggtgggtgtgcaggagtaaggggcagatacaagtatgcagttagactgattcattctctcgtggccaagcttagcctggtgtggtaacgaatgattggttacacgaaaaatagattacatggcctttgttcgtttgttatttttatctcctagctgtggaagacagaaaattgttcataggaatggtttccaagaaatgtaacgagaatgatatcagagtgatgttttctccattcggtcagatagaagaatgccggattctccggggacctgatgggctgagtcgaggtgagtgtgttctctgtaaagtctttttctttaggtgctaattggaactctgtgtcacagtcaagggaggtgtagacatcgcaggcatcacatacagcaggggtcagcttgcagtacatctcatgcgatcaagtcatccaacctgaacttttctctgtaaccagaatgatcatgtcttacatgtccaggtgaaaaggtctgagtgccaacatattagcccaggtcccatgggacgctgtcaggctgctctacatctttccccctttcatcctcaaattgagaacatttgggcgacaaggagagaaggtggaggatgggaatggatgctcagccagacttttctctgcttgtctgaatggctgtaaaagatatggtcctcgtcatagccatataagcctagaaagagtgccatgctcacgcagtgcagaacagaagcagtacctcccaggaacagacctgtcctgccctgtcttgtccagcctctggtccccagccccaccctgtaagtggcagaaaaatgactgacctgaggaaaatcgtaaactcttcttttgccacaatggaagcaaaaggtgtgtttagagccatggggaaagctacagttttgtgagccactgtaggagtcagtgggggttacccttctcttcccagaccctcctcctcctcaacaagaccacgcacccgcgtccttaaactacaagaaggttgacagtatgtatcaacagttactctgactgtacttttccacgtcaatctaaagaattgtatatgtcaaacattttcagtttgtcagtaagtcttcattttgcagtgcagttcccatggagctaattaagaactgtgctcattctcacactcaggttctgggccagctctgtacccacaccattcactgaaagaaatggccaggccctaaatgtcacggtggtcatttctacctgtctcactggggttacctaatcaaaactgacaggaaggtttttcttcttcatcttaggcataaaacttcatgttgtcagctcctagaactaaaatctcagaggaccaaagtttcacccacatccacctccaaagttcctaatggaggccgtcaggagaagaggggatagaatggcaccagctcttgactctggttctgggggagcagggggcagtgtgaagccatatgtcattcattctgtcacctcagaaacacatgttatctaagcctaacgtcaaggctgaatgtctacatgctgaagaagatactgaatgtgacccttgaacaacagacttagtacctgagacaaggaatgcagggagcatgaagatgacagaaaaagagagggaggcagggaaatttaaattagagtggagtttatagttgctcaggggtcagtgagacttaactttcagtcccagaatttgaaccttagtccatttgctttcctatttctgtctcgtaatttacccattcagaagctgacagcaggaaagtgtgtgtccttcttctctcacagggcagcattagttcccagtcactggctcctcccacacctactgtctggatgggcgcatagagaccatgagtgcaaagctgtgtgctagcttcctgccttcctgatgcttggcttagacagctaggaaatgaccctctggctcactgcctctgccatgcagggaaggaaagcgagagcgggttgaaagcgggctctgtgtgtctttaggttacattactgttcataggaaagagcagaacactcactgctcagtagcagaacttagccactttgctctgctgttcagttgattaaccaacgcttcctatagtaagctataggagccttgtcaggaattttttgatgtcataaatggatgtgctcaatgtaaagaagagaataccacctcatcgttaaacacaaaaataattctggtaaactagtgaaaattccctcttagaaaaagtaaaatactcatttataaccattctttctgaaatacaaagacagacagtgtacgtttttcagtcagtaggacctagggacttctggccacaggtcctgctcctcaatcactgtatttgataaaagaataattctctttcatggtacgattttattctcaaaggaatttcagttttcaataaaatattagtaaatgtctcccactagtgatactccagatgaaaggcacttggcattttttccctcagtgtctgttgctagctcagctgctgaaaaactaataacaaacaaaaatcaagtgaaatgaaagcatggctgctctggagtaccttatatgaaccagggtatcgactactcagtaagactgtttctacggtagacagttaatgatgacagaggtaaggtgcagtcggggggggggggggttagccacttacctttagtctgggtttacacatttcacctataaatatgaagattagtcaagcagagactaccaagattggtggtagtcccctaccactccacctctgccacatcagccatttggattcctcctgaaacatttcaacccactttccttccctgcatggcagaggcagtgagccagagggtcatttcctagctgtctaagccaagcatcaggaaggcaggaagctagcacacagctttgcactcatggtctctatgcgcccatccagacagtaggtgtgggaggagccagtgactgggaactaatgctgacctgtgagagaagaaggacacacacttttctgctgccagtgcactgccaaggctcctcagacatgttgacttaggacaccactcatcagcatagagacctgaaagctgcaggactcagtgcctatcgaggccgatttatactttctatcagagccattatccttgggggatggggagaacaaaactcaaacctcactgtcactagtccatgtcctaggacagacactctcaggaaacagttgttaactgtctaaatggaaacaacttgccactcacatagaactccctaccaaatattctggctcatccatacaaagggcagtatgccaaatctaaggtctttcctccactggggacgatcactcactctgctgcctctcctgtttctgaaagcatgtggctcatcactttcaggcagcttcacatcaatagctacaccattgtgcaaggacagctgcacctcccagacacctgacagctctccaggagaaaacaagtaggccaccacaacccatctgtggcatttccagtgagacatttatgctcaacagcaagctggaagcatccacagcaaatgtacatgtttaagagtgttaccttaggacgttgaacttaagtagacatgttctcactgatgcctacagtacgaaggttgctgaggtctgacctgtgagagtgcacagtaacagctgaagagtcagtagaaaaagctcatttctttgttctttcccacaaactgtcatagaatcttcactaccacttacggtagctttctttctccttgtataagagtactccagctgtgttccagaattcccctgcctagacccttgacatatgaatattttcagggacgagcacagacagggcttagcagttaagtcctcgtttgttccttgtttgtattcaagcagtatattaagatagggcttttgaatgatcagtacaggtgtatggactagactgtattgatcagtttggttttgtccacccagtacctaaatattcatctgcattgtaaactttcatcacatgtctcttggaatactgactacattatgccgtcttgttccaaataatcttccagccccatgtaagtgatgagatcttccagctgctaagtgggtcctagtctgacccaaattcagatgccatagataaatgattgatgtgttaatgttttcaatatcctaacccaacactgacagattagatcactaatgcacgtgcccaagtgttatgtggtactgtgtgattgacctcccggccagtgcagaaagacacagcaaacattggctgcagtcatcctttgtcaggtgataattaatctgtaagtaactattcctcctttgaagcctccttcatgccgcacagtaacttaagtcatgttcttctatttgagatacacaagctctgtgcccctttgaaagaggcacaagaacaagagaccctggcatccttcaggcttttaaaaggacttctaactttggggtttctttggctttgggttttggtccttttatttggagcaagaattcatttagttctataaaattctcttgacccctattagtgggtggtggtggcacacatgggaggcagagaccagcagatctcttgagttcaaggtcagtctattctacagagcaagttccagtacagagaaaaaccctgtcttggaaaaagaaaagaaatggggaaagatgccttttttattgaaatggcgagtgtggtagatctatcccaagcactccaccctctatgaagagggctttgagctttccttagatcctgtctgtaggaggaaagctctttaaagaagcctttccctggtcagtcatctctgtcttagcagcaagaaggcagtctcactgaaataagaaaaattccattcctcattcctagtagtaatctctgacattctcaaaggggagacaatcattacacgtaactacaagttagccacaaaatgtgtttttcttttatatgtttttggcagttttaagacagtggtgtgcatatatgatactatatccaaaccagaaatgagaaatgtgtatttttttcctccagtctgatttctctggcattgaagtcagttacaagaggactagttgccaagctggtacatttacagtcctaaatagctaaggcgctgtcctgtaagggctcagtcagcgccacttcatgcagaagggaggactggttgagactgaggtacttctgcccagtggaaagccttctgactcagctgtagaaaggcacaggccagttttcatagtagagctcctatgctcctatgttgatagagtcacactttagagacctggggctggagccactaccatgtctgtacttgcattggaaagaacttagaatttatccatataactaccacagcctcttgtgatagaaattacaaaggttaacaagattcactattccaaacaccagttgactcccaagttgcttaactgcatacagagtaaaattcttcaccatgcattcccactttttaaacgacacatttttttcctcctaattgagtacagcacacagtaaagaatttgacagaagcccctaaggagacggcttctctcttttcccgcacactgccagtagaataaaaaggttaaggaagccatcacatttgacagatcattttttgaatgggttagtattgtaaaattagaagcactgttcgggtttttaattgcagagggcagtggtttgaaatggtagagattttattatgcctgctaattgctttatctttctcacaatggttacttacaagttacttatgtgaaattgtgataagtgagtaagcttgccttattgattcttattgacattttacatgtttcttatgcatttttaacctccatttggaaagtgtcagcttggcacacattccttacatactatgagcaaacgaagtgaatataacagtctccgtgaccattaaagcagatctagtccctgcttcatatgctttcagacagatctctgctacagggtttggccttcagtgtagtctcaaggcaagaagtggaaaaattaaaatctcttgttttatttcctctgtaattttagtgataatcattctgaggccgtattactttgaaacatgataaatttaaggctataatttcagaccttaatatcaatatggagtccagcggaggcactgtcatctctcatacactgttacgcatgtggtctagacacctgagagagagaaaaggccattgtttctgtggatgccgtgctccagtcctgtctaggcacatgcaacatgtttaaataggaggctttgtcactgctgtctgtcagagaactgcaagcaccagctcagtactcacgctggacttggtgcttgcttcttaagatcttctcaactaatgggggatgtgggatgacctcccctgtattctaggaacttttcataccatgtggcaaaacaatacgcatttagctccttttatgactagatgccattgtgtactggggatggtggacaggtactgctttctcctagctgtttgattagaaggcactatagcaatattggtttgatattctcaccaggtacatagtacaagacaaaagaaaaaaatatatttatgactggctaatttacataaaccaagcaatctgctggttgtttgaatgtagaatgttctgttttgtttattggccacaggggcaacaatctcatcgtgctgatggcaggattctgttttcatgcatttgctgtgagatgacaatgagcttccgcctctcagtgtttagatctgcttcatttggaaatcttttaagtagtaataataataatgttttgaggaaattgagtggaacactaaattattcgctgatacctaagttcaaactgtgcaaggctaaagaagctagaaaatcaatgcacttttaaagtcattagagatcataaatgaaataagtctgcattgctttagctaagcttttagtgtgctgtggtattattataaaatcagcctaaatctgcattaatttcacagcctttttctctaacaagcccaagggtacatgatgaataaaatgtaaatttcacaaggcagtgtttttattgtacaaagagcaatgagccaagtacttcaagtggtggcctgcatggtggccaatgctgccatctgaagcaggaatccatagctatggatgctagctatcttacagcactagataaaataaacacaggaagctttatagatctcgtagatgttcagagaaatgtacattgtcttgtgtgtgttaaactttaggtcaaatctctcattcctttcagaaaagttacaacttccaaagtcatgagaattttgtacaaattacagtttttgtaatttatttcatatgcactgttgattttttctcagagtaatagtttgttttaataattagtaattactgctttgtaatagatttggtatatttgtttacatttgaatagcatcaatttatatttatatgtttttaactctccaagatgaattagatatatttatttgttaacattttgagctcttgaaatttatttgctaatttgcccttggtatgatgaattctttatttcgtaaaattcagtgatgcattttgaaatacaaagtcatatgtacagtgtatgcatgctgtcaatgtagagagcatcagccaaggaggagatataaagtagcccacttttaacttagaaaatggaagttaccttttgctactttcaaaccttttgggaaaaaaaaaatgtaacgttctccctagttcccttttaaaaaaaaaaaaaagctaatgaataaattgttcttctttggtcagattagcaattcaggactgtgaataaaaaacaaactaagctaaaaccaaagagagaagctgtttacttttatgtactactgagaacagtgtggtcttgtggcagttctcgtagactgtgttggtttaacaagcgtccaacccttttgtcttgttgttttttgtctttcctgctccctgtccccttgtttcccacaggctgtgcgtttgtcacattttctacaagggcaatggcacagaatgcaatcaaagccatgcatcagtctcagaccatggaggtactgtatcatctgccctttctttgttttctttgtgcaaatgatggggaatggtaaagcagttctctcctgtgtggattgttcacatgacaatcacagacctaagctctcaccggtccgcttttcattcactcatattcatccccctctctttctctctctgtttccctcctcacttcgttccctcttctctctttccacttgcatttccccctcatgactggaaatgtactttagtgagaccttccacctgccctacagctgtcttttgagcctttattggagtaacacaggttctgagatatgaggcactcaatgcaaaatgtcattgtggacctagaggactgaatatataccccacaacagggctggtatggactatactaacaacatccacctcaggtccctactggaacaattcacctattacagatcttaatatactcaaacagactcttttcatctcaagaattttgaagaaagttaataattctcctatttatcagtgaaatgttaattttcagtctcctgaataatcagattggtccccttactcaaaggtgaacaaagaaatgtccatgcttcaatccaacctcctaaaaggttgtgactgaaggaacaggagactcagcaatgtgaaatatgccacaggtggagatgcacgctctctgtgctcgctctgtgattcagaattctgcacaagaacattccaaaagtgacatgccatcactaactctgtcttgtctgataggatcatttgagagtgcatgtgctgccgtgttacgtatactgtgtctgtgtatgggtgactttctccagaggtggtggccttatgctgttatatgaagctgtgttttcctatttgaacaattttttttgcaattttatttaatgtgcaaaaaaatagtaattgtttgagcttctttttttgaaattcccctttgattgggattttattttttggtttgtttgattgtttgtttgtttgtttgttttttgcaatgctgcatcttccaaagcatgctgggagctaagtgatcattatgcgtcatgttctatgggaaacttctttatattaattcagaaggagggtggaagggttgggaggggtgtgcatggcattgtcattaagtgtttactgtacttttttgagttgtgacatcagcattgcaaagcctattgtcttttttgaacattcatttgcctttgatattcctaatatatataattaatgtgttttccttgcagtgcaatgcatttttaggacaatcccacccccctacctgaaggcaagctcaggtgaaaattgaacatggtagaaaataataagcaggattccaattttgtctaccttgccgtcacattctccatgttctggcttacttttacttgtaggctgctccagatgtgtggatttccagctgtttttcagctcagtcattaaaatgaaagtgctgtttaaaaaaaaaaaaaagtcctcatatatacttatttacatatatgtatttagctatttttatttcctataattgaggaatgtataccaaaattgatctccccaataaggttttaaagttcttttgacacttaaaagagctgccatccccacatgagttcatagagagtgctgacatggtctgagtctcagttctattgccccagagctcaggatccaaggcagaagtgggcatgaccaaaccatgggaggcgtccgtgccaagaaccctgtgaggctggcacgggcatgttcttcagattacagttagtatgctcctctttacaactggatacccatgcttaaacagaagacccttggtcccacttacaaattctgacctctgaatagaacattacataccacgaagttctactgtaaccatacagctacagacgtttgcttgagttttaactgattacattgttttcaggactttggtatgcatctttaagcaagacagtattatttaacttacaatgatgtgaatgttcaaagatttgtttttagaacatgcatatagtatctgtttccctttttttttcctacatgatccccacttgtttttctctcatgacttaaacgggtcacttttaaagctgcaagtgtcctttttcacatttaagaatgagaaaccaataaatgcactattagaagatgctggtgtttgtcataggacacttggtgcagcagtagaacactctccatgcagaacctctgtgttattttcatgttcagaatattttgctctctcttaagaaatagtaaagtactgaaatatgaagcagataaaaatgtattggattttttaatggcggaaatgttattattatataatttattgtcatttaacattctgtcctgtgattctgcctatcagagctttaggttgattagagcttctacactgaaacacttaggtctttttttttactttcttaactaacagacttgatagcctaatgtaatccatagctaaattctcagtaactaaccaaagtgataaaggaaaataggcaagcttgtatcttaaaagaaaaaatgacctaacgggaaaagaaggaaaaagttcatttaaataggaatatatcttttgtgagagaagtctattatcacacaataagattttgtttagtcacttaggtagacataccttttagaaagctccacagaatgtaagaaaatagtgacagcacgtgctccttggccataccaaggacaagaaaaggctgggggcgaggggtgcttttcagctgagtccttaccagaggcagatgctctgaaggtgcttgggataggaccattctgtttgaagtactaggctgatattttcccaaagacaatatctaagtcaacattaatttactttattatgtgacctttgaccatttctttctcactattcgtactccttaccttttaaaggaaatgagaactgaatgagacttgtcaaatggtgagatgactagagaaggagctgggcagactgatactttaagatccaccgctttgactagacagggtgtgcttctgactcttttggtttgctctggggactttggacagaacagaagtgacatggacggaggaaaagagacctccctgagaccatgtgcataattactttaatcagtgcctagtttcccaattctctgtccttcagagagaaatgaaactcacttctttattttattgtgtcaaaactattttcactgttccagtgttcagaaatacgtagctgaaaataaacgaatggtaaaaatgagtgatattattttcactccaattgtgatttctgtccctttatgctctacccatatatggaaatagcagacacatgatgacaaggttatctttaagtcaagcaaaccatgaagcttaattaaagataaggtctctatcttgagggaagttctgaaggaagctgaaggaagacatgtgaagagaggagacagtgtactaatcaaacccagaaaacaagtggcttcagcaacaggcccctttaaagacatcagtggcaggatatggagttttctgttgatggtacattcagagaagacggactatcaaaccatctaaaaccattccagaccattccatgtgctccaggatagctaagaaagataaatccagtggcgactgaacattacagagggattcaatcaggctgtaccctgtcttcactttccaatgtctgcccacagggctgctcttcaccaatcgtggtgaagtttgctgacactcagaaggacaaagagcaaaggcgcctccagcagcagcttgcacagcagatgcaacagctcaacactgccacttgggggaacctaacaggactgggtggacttaccccgcagtacctggcggtaagtgcccaagaacgtgggtttctgtgagatccatgaaggaacagaacaccaagtccaaagctatcaaaagctacttttaagtatgacaaaattttactttctatacattttgagtcccagaaattatgaaatcagcattagggcaggattttattaatcaaattgattagcataaaaatgtgcctaacttaactttggcctgttggcaactgaccaaaactcagtccactagacttgtaaacagtattttaaggcacagtaaaaatccagtgctagaagtgctgcctacttgaaaactgtgatctaaactttagattctatagattccgggagaatcggctgagagctaccagctgacaggttaatactaccctactagtgaggaagactcccgtcttcatcctgggtctttccctgtgaagcaggattaatggatggctctactctttcctttgtaggccaaacagactcagctctctgagccatctcttagatttttcaggttctgactgtttcctttatattaatcatctctctttgccattgtctttattgaaatacagtggccagaacttacaacagtccctctcttaggatgtaagcaaactgaagagcgagcccaggcatggacttggaaccatgcagcagctgtgagtggcagcctttgtagaaactgcccttgtgggctgggaagcagtgagtggcctgcttctctgcttcacttgactgtttggaaacctaaactccatgcagcatgtttattaatgacaccttttattctgagagtgttagcaaggacatgtgcatgttctttctaattctgtcactttacattgtacaggagcatatcatccatgggctttactctgtagccaaagctataccgttttataagaccctcttcccttctgctctgaaagggaagatgaggaagggagccccaggaggccaactgcctttaccttcaacacacagctgctagtgtctatgggccttcaaggaacttaggttttcaggctttatctccaccactaccacctccttccctagaagagtctgtcatgtgaaggagctgttcagtagagaatgggtgaatgaatgaatgaatgaatgaatgaatgatgagaatcatgcttttttttcctgtcttcatttcaaccagtaaaagtttgactacctttactgtcatttttttggctgtttatcttttccttaaagataccatgggtatctttgccaggattcttgcttaaatgtacatatatgtgctgccatgctttctttctagtctgttgtctagtgattttatttccaaaagaagaacataacctgtaccctagagctactctgtttcccatcctcaccccagcgtttcttcttttccagaagtaatcagtgttctaattcacgttttacctttttaaaaaattttgagactctgtctttcccttccctgtcttccctccaactcctcccatatacccactctttcaaattcatagcctcttttttattgttattatacgtctatatgcataactatatacatatgtagtcctaagtagaacctgtgtttttcagggctgtgtggcactggataaccaatcagtgtgctcttccctgggagggcccgcctctccctcagccaatcagtgtgctcttccctgggagggcctgcctctccctcagccagctctcttcacttgcctctctctcagctctcttcacttgcctctagcttttatggagggttgaagcctcacaggtttttccgcatccagcttggcatatctgttggtgtcatccttgttcagctcacatttgggtggacgttatggctgcagctagacaatcctggaattataccttcatatttatatattctattgctgaggtatatacttcattaacaagtcaccttaatgataggtacctaaatgtttattcaaggatgacgtcatgcttgcctttttatactttctatgagtccagattcttgttctaccagttctgaaaacgaagacatagataggtacctgtcccagtattatgacatttcccttgctccacagctcacagaaagctcttctatgtgtttctatgacccccatctgaaaagtattttccttacctggaaaaaaaaaaaagcttactcatttatagaactgcaattctatatgctgtgaataggttttctcatgtcctgatatcagtgtgtcttaggcatccttctccactcttgtcactccacagtcttgtctgaaggtgctatgggccttcgaggtgccccctactccatggtaagccagagtccaagcctgtttgtgtcttgactttccagatcctctggttaactcagcaggtgttactgcctccttgcgataccttcaaggctattttacaactttaagggaaaaaaaaataatatatactgtaaagcagggtttgccacctttaaatacaaatggatgagaaactcaacaaatcaaaccaaaataagatttttcttgtattacaatagacaatccctaggtttccgcatttctcttgctgttctccacttgctatgtgactttgagagcaggcttgtgagtatgcagctgcatgtgtccctacagataaactttatctttactgatctactttacagaaagaaaaatttctttacatctactcagtgtcttgaatgggttctaaattagcttgcactccagcaaaggtgaacaagtacatttcagaactggaactttgtgtctttatgctgtgacacccactgattctgcacgcagacagaaaatgaagactatcataggcaaactaattaatatctttttgtaaagattttgacatacctaaaatacacagattgagcatacatacctgataattccaggttttgacaaatactttgtcttttctgctggtaaagaccatcttaagaataattgtccacttgcttggccgtgtgtctgttactgtaactacaaatagatgctttgtggctgcaatcattatggttcttaccattgttctgagtatgtatgctcatgattccagctgagaagctagcccttggtggctttggggaaagaaagcctctttttgttggtgtatggcccctgataagttgcctgtgctccaggggaggtcccacatccattcaccatgtgcatatgggtgacatattaaaaagagaaaacatgaaatccaaagggggatacatagaagggattagtgaagtcggaggaggaaaatggtggtcaaagtatattgtacacatatataaaattcttaaagaataaatctttttgaatatcatttaataaagaataatggaaaaaaaggggggggctggtgagatggctcagggggtaagagcacccgactgctcttccaaaggtccaaagttcaaatcccagcaaccacatggtggctcacaaccacctgtaacagagatctgatgccctcttctggtgcgtctgaagacagctacagtgtacttacatataattaattaattaattaattaattaataagcaaacaaacaaaagaataatggaaaactgagctgggaaggaaagtagaagagaggagaaaatggactctgattgacagataagttacagtagctaggagactgcagagagatagaactactcatgctttgttggtctcaaaatttagcacctgatttctgaaaaaagtaaatagattaattgttctaaggcagcagtgttagttcctagtgtctgtgtttttcgatggagattagacattagtatgaatttacacctccaactctgggcaccttcagcctgtcaacaaggaatggcagccaactatataaacataaaggaaactaattttgtaccccatataatgctccgcattgttctgactgagttcttgtgttcttttgcagcttctgcagcaggccacctcctccagcaacctgggtgcattcagtggcattcagcaaatggctggtaagtcatgaaacatgccattccctttgaccatactagtttctgaattgttggttgtttccacccataaaggaaggagccgaagggaaacagtaaagagcagttagcagataactagcatctgtgtcttgggcattaaagctgcagtcagctgctcagagctgttttcctgcttttgcatttatcctcagtcagagctcaccctgcagaacacttaggagggaggctgcagaatatattcttttagttatttgtgggatttttgttaatggaatgatgactgggagatttctggcaatattcctatatttacggatagttgaaataattaacatctctaaaaaattttaataataggtgatcaataaaaatgttcttacctccataacaaaagccaagatcaccagcatacatttgatacagtttgtaggcccttgataatgacaactaacccagcgccttttctaaacttgaaacccaattaacagaactgtgcatcgcaggcttttatctgaaagtataatctttgttctcagaaaaatcaaagtgttactgatttgaaaagcagcttattgaaggattcctttttataatgagctgtgccagtagctgcagcaacacagtgattagtgaaaggtcagccctcctgtgccacctttcttgctgacacccaccctcgctcagggccagagaggcagtgtgtgcaggaacccagaatgcaggaggatcaggagaaggctttctccttgtttgagtccaaaagggtaggtgtgggaaaggcatggaagagactgagggaggtgggttagagtgaatcagttttctttcactaaggatactgcaaattagttaaatgaaattcgcatgtataaaataaaaaccagttttagttatctgtcagtatagagactcatcttttccacttaatttttttccaaatatatgcctttagttagttttggtggtggtggtgtttattctgaaaggtttctctccacttgtgttctctgagtaacagcccagttttccattgtggtccacaaggtaagggcaattcgtcagattgtataacttattcatatctactgctatcactgtaatacagcttccacattactcaaaatatgtatttcaaattgataaatagttaaatgattgcaattatatttaagaagtcgtgttaggatgctggtcttagaactaacaatcacattgactggctaatggctagtgtatttataatctgtgaaggaaactagagaggtattagtaaaacattcaggggaattcctatgctttgaaaggaaaagaaaaacctctcagtcataagctgctaaaatacatgctaacgttggtcaccttttgaccacgtgggagaattgttcctcttctagtagcacagacccacgcagattcaaaattaggggttttcctcagtggtagccttgggctcccctactcccagagctgcattgtgcagacaaggctgcctcttcctgcagctgttgcctagcgtgtcttcccaggtggacagaatgccttcccggttttcattggaatgtgcgtgcctctgccatgccagctacaggtcaggatattagcatctacatgtgctctgtgctcatctgaaaactgaggttatctaagagtgcccctaaaagctgccatagagcagatagctaatttaaagatgctttgtaaatgctctggagttcccaaaatacctgtttcttgaaccttcatcatggtgaatgcaccacactaagttagcacatactgaaaatcaaatacagaacagtccactatgagccacatcccggatagttaaagtattaaaaaataggcagcatgccactttttgtgtagctttataaaagtacttcttgcttatatgagtgatcaagtttcatctttctaagtatttaggtagtgtgtgtttttttcaataaagtagtggaatgtcttgtccccagtagggcttcctttggtagggctgactttttgcacttaccttttaccgacccatggggccattctcatcccagtcaccagagtgtccccgcattcctcaaacagctcagcactcaagggcacactgcacgctggagagcaaggcctgcccagtgctttaatggcacagccagtcctcctgtaaaggcgctagagaccatttctgaacagatgaatgaaaagctgtttgtgagttacaatgtagatttgtattttggatgtattccctgcagagcgcaagtcaaatgcccacttttttaattacaaaacttagttttagctgtccatataaactgaaaaacaccagaaaaaccattgttactaccgtcatagttgttactgagaattcgaagatagtctaatataaagcatgttacagagtttattatatacaacaaacacagtagaagtcatagcataataaagttgagaggaccagaggtcacttactcccagccacacctggttttcaactgttttttgaatgactggtagtctaaaggtaggaaaaacatcagaaagtttaacaaagtaaaagtgcatgaatcatagcaccaaggagtggaacattttgaagccaatactgtttgtctatgagcagctttcagagcacagtggtctctcaggagatagggattttaaattggtttgtttatatgagcaaaacattttcatctgaggagagaaccaaggcaaagaaaaagaaaaccaaaaaaaaataaattttatatgacatattactaaataattgcatcagtaaaatctaattgttagaccatagactctgtagctagtttcctttctctctcagtcacagaaatcaagccaaatcttagagcttcctaggatagttaagaggctatgctatacagtatgcttgcaggccctccctcttgccactgcaaggttagtttaaagtactacttaataatgcctgaatcttggcacttacactaagctatactaaatcacgtgatgtcggacttccaccacctcctgaaaaatctatagaaatcagaaaaccccgtttgttgttcagagcatctgaaggctttccttaactaaaaatcatgctgcatatggtggctgtcccctccttccatcttcaagctcttctcctaatgaagctacagcaggttttaataagaaggctctctcccttcaagaccccatcatgttgtctttggtatggtatgtctctcctaatggccttacaatgttcattctgaagggtgatttcatataaccaagctctttccccaaaccagatgcatttggcttctgtcttcagtgtatatagtatgatgagctatatactttatactgtaactatacatcagccatatgttttcttcgaaaagtcttaaccattttcccttgaaactacaaattttttattatttctataaacagaacctttactaaataaggagttttatagcagaaatggatttagaatcaactcttcatcagctaaactcctttatgtgtactcactctgcttctgtgaaggtgaggggaaagagccttcttttcattgatttgactttcccttttaaaacttttaacacagcatattgatattctactcacctctagtgtttgttcaatgaatttttgagatttggcaagtgtgggatctgcatcttcctaagagtgcatacctgaggtgaaggagaaagaacaaggaccaggtagcctttggtctttaacttctgcatggctacggtagcagcaccttagaagattgtttaatgagaaaagaggaacacttcacatttgcatttaacttagatccttagaaaatcacagttccaagagtataaaaggcaaaatcacctctttagtatgctgcaatcaaaaaaggttaaatgttatgttgagaccacagccagcaccattaaatggactggtatgaattaggatacaaacctccccaaaccactttatgattatgtgacttttagcatgccatttgaaaaggggtgagaagggccagcaaacttaatacaaatcactgagctggatatggatccgtatttcaagcccagttaacctggtccaaaacctgctctgtctgcagtgtgacccagccaggtcaggtatgtttgtataacctcaaactccagtgatgtacctacccagatggcctaatggcaaatcacaaatcccagctgaaagtagagccccacagctactaaagaactagctgctcagagaaaacaagaaactgcctcctttcattctggaaagtgtttccaatttactgcgtatgtcaaacaagaatattttctagaacaagaagggtttttgttttatgaccattgatggtttgcctgcatgtgtgtctatgtgagggtgtcagatcccttggaactagagttacagactgttgtgaactgccacctgggtgctgggaattgaacccaggtcctctggaagagcagcctgtgctcttaaccactgagccatctctccagccatttttttttattttaaaagacagggccttacccaggctagcctccaactcagtatttgaccaaaaatgaccttgaactcgtggccctcctgcttcaaccctctgaaatcctaggattataggtatgtactaccacaaccagtttctgtggtgctggatgcagaacccagggctttgcttaggacagacaagcactctaccagctgaactacatcctatccccagaatcaaacattcctaagaaatcattaggagctgaagctgtaggtgaagaggaattagctactgaggaatagtgcaactgctggagtttgaatttggttaagttgactaattgccttctaaatatctgctccaaattttgaaagtaataataaattattaattgaaacagttgcttaagacaacaagatgcttcttttgtgaattaaaaacagtctctgagaagattgtctgagagtgtctttcacaaatagagaagagggtttgcaaaaccagtgtctgggcagtcagagaagctccagttggagcagctcccagcatgaagtgtgctcatggcccacagaggccctgcgttcttccctgagtctccagcagtccacagcacagacacttcctgtgaatgtgctaataggccttatgagagagctctgtaaccacccatctgtcactttttaacagacctgattggcaagcacttgtaacaactgacatctgttctcacttattgatatgcagatttatggtaattgctatgaacaataagacacaaaattacctaaggtgaacattaaattaaattttgatgcccttctccttataaataatttttttaatcttaaatttcaagtaggaattttgtgcatctgttttgtacataattttctcattttggaggattttttccttcttaagtaatgactgaaaacgtaaatctccttactcccacattttttcttttgttgtcatcatagtgactcacttttaggtttcctaaaacttaagtgtttcgcatgtttagttacctttctgccctgggtttgagaggtgcccagctgagcacaagttaaatgtggccatttttcttctcagaaaagctgtttgccaagcaggagccagcttctaagaaggatgacaggcgccttccagtctggtgccctttcatggcgaaagagaaagtctgagtggaggtgggagaagagcctactgcaggcaggggctgagaaagaaggaaaggcagggagcactcctcaccacaggaaggagtgaaagaaaccacaagtgtggattccaaatgactggaagccaagactgcctgtggagcccagggaaagtcagacagagtcagtagagggaggagagatcctccagttccagagaacacctgtgggtgggagcagctgaaggcagctaaggtaaagctaagttaatctctgctcggggagtctggtgagggtgggcagcgcctgctttccttacatggaacccttaccttctctccgacctctgaccctagaggactcataatgacgacgtgtctcattttgagtgagaacgccctggccaggtaccagcttgtggcagaaagagcccagacctgtcaccagggctgtgctgttgtcagtgaagggttgaaaagtaccatgcccagtaagtttcccaagctccttctaatcacctaggatcacacccgttataaaccgaatacaagatgtcgggagcttttagaccgcagactgatgtgcgacggccacagagagggatggccagaagaggcgtctgacctgtgtcagactgggtcgagggagaaggcactgtgccctgtgctcacctaccaagcatcctcctgttcagctggtaacacagccacaggaagatgaagggagcttctctcaggcctcagggctgtggcactgcctagcttcaatctctgttgagtccactattcagctatacctgtgggaacatgagcacaggctctctggcttctgtgtgtgtgtgtgtgtgtgtgtgtgtgtgtgtgtgtgtgtgtgtgtgagtctgtgtgtgtgtgagtctgtgtgtgtgtgtgtgtgtgtgtgtgtgtgtgtgtgtttacactgaaaaagaggatccttttcttttcctactattccttagttccagtttcttcttggtttctcatatcatataatttactgccccatctgtagaaatttcattcaattttttcccccagaactttggtctttttcagttatcttggtaagtccaaggttatatacaactttctgggatcctttacagaaaaagaaagtttcacacataacaagcacacttttttttccataaagcttaggaggttcctggactgcctgaaccccatcagtggactttgagctacgtgggagaaaggataaaggctttagttttgagaaagagccatagtgacccatcagttcactgaggcaactatagccagttatctgttttgtctgagatgagtagaagaagaggggaagatgggtataaagagatgaaattaagaaatgaaacactgattcagaaagatgatggagcacagggtttgaaatggtccctggtccacttagtcctaagcaagattaccctgagtttcaggtactgagtttaagacctgacatttccaccaaacaggacttgcattaggtcataaaggccagatgactcactggacagctttagttgtcttagattgtattggaggctaacaagaccactgcagtaaccattaggaacagggaagttctgttcccagccatattttcttttgaaattttatgttgtacatttgtcccttctctttctccctgctccttctaaagtcttatgagatacagtttagtcaagtaaatgggaactacagcagaaggaagaaaaggcaaaagagccctaggtgaggaccaggacagagaggacaaatggaaaggctggactggcaggagggagacacatatataaagaagaaagcacaggatgctctcagatttcctaggactgcaccttccagaagtggcttctaaggactaggtatggtgttttgacctttgcatacttcagaaccctgtctgtgacctattcagcagtagtgctgcatataccatatggttttgttatgaatcctgagaccacatgtaaagcaaagaaaggcgtgctggtccctgctttgccctcattctcacagtctttacttgagataatattgctgttgctagctgaagttaagagaacttactcaaggccaagacaattgaaaggtcaccagatatttgacaaatggcctttactgttcttacaaagaaacctggagcttgtggctttgtgacaaagcattggcaggacctcagcaccccaaaaggtgttggggctaggtggcaagaagaagctgttcctccccccttctggcactagctgtgcacaagccagaagttctcactgtgaggttggttgcataggcatcctttgtttcctttacaaaatgttagcaaggtaatagccattaactcttgtcaggcaaatacagtggggcagacccagttttcagtgctgcttctgcctcacagccagtgcccatcactgcagagccttattggaacttcaactcagaccctgctgaacaaggccactcccgaaaagcttgtgatccctgggcctcagcttcctcacagcttgaagcagacatatttcaaagagtctgcacttggacttaccagctgccatgtccctgctttctaatccatgctgtttggttgtcctctgagctggggtggccgtacagcacaagctagatgttctgctgggttctaaggctacattcaagaaccacattgaaccagattacaggggggggggggggggnnnnnnnnnnnnnnnnnnnngggggggggggggagagagagagagagagagagagagagagagagagagagagagagagaaagagacgaaggagagagagaaagagagaaagaagaaggaggaggagaacttactatttgaacccagctctacccaaggtcacattctttggtctttacacatattgatttctcagaaaatagactctattttaattatactctagttggagatcccaaggtacaagcagtcagtcaggtttctccagatagctggggtaaaaaaaagctgaatttatttacatccagactatctcagagcagagctgcatactcttcaccaggccacgctgctgtaatatagattgttgtcaccaacatagactcgcgtacattcaaggtactaggaatagaagtcaagggtaaaagatgggatgttcttaccagggctaccttgaaaaaccaggagtgtggaaaccatgcttgggaataggggtcctagatctaggaagtagcaggtacgatactgagtgcttacattttagaataggctgtggacaccattccagagaaagtcaataatcccccacgtctcagctgaccactgctttcctctgctcctctctcagttccatctgatcagaggctttggtgataatgtggttgagtgtagtctctaaacactagtgaactagaaggactgctctcagtcactgccttccccctactcaagtgtccagcagcctccctgtgcatgcaagccttcatatataattttaatataaatgtatacaataaattaatgcagctcctagtaggatttctttattctactagttcccagtgacgagagaccaaagcgagaccaagatttcttctgaagcctcacctcaatccccggacaatctgtcttaatcccctaaactaacctggcctcctcccagccaagatcccaacagtacttgaattcatggctttccatgcttctgctgaactctcaagagctctttcccctcctcctcatggcagagctgaatctccttccctctctctttctccttccctggcttgtggaaatcctgccctattttctcttgtgctaatcacccttggttgattagcatttattgacaagactaagaataaatggtaagaactgtttacacaaacttgagatggattcttgacgtaagcattataatgttgtgtccagattagaacaagatatgagggcagagaaatcaacaattcaataacacaaggaaaagctttccttagcgcacagacacattctgcctatccccagtcttccttattgcccatttattctcagtgtcttgcacagggtctgtcctatcattgctctctaataaatactgagtggttatatggatgtgggatggactgatggggaaatatagagtcttcctgactctgtcaaactctgcccctttccattttcctcaaatcactcagatgctgaggattacagtagcctttctcttctgctactattgtggcagtatttgccaatagcttgtctttgcattgtagtggttttttaacatctttgagccattccttggagtggtatcttagggtctatctgtctgcctggtctttatacttaccaacaaggaaaaggtgaagagggtggcagagactgcctcaggtggtgatatatgtgaaggggaaataaggatggtcactttggaaaggtcgcagaccctcactctgaattcatacagagacaggacagtgggaagagagagtcactttgttgttgtcaccttagcttcaagacctgtaatgaatgtcagcgtgtaagctataaggtaaaggattcctgtctaacaaatgtacatttaattagataataactgaagaaaaacagtaaacatttgctacagatataaataccaaagagctatcaatgggcaaaactaaaagcatgattggctgtatagacagtcttgttgatagcagttttttaaaattatgtgctgttattcagagtctatctatgacctaccatgtattagttctctaccccaggtccaccctctgtgtctgtgtttctttgcctgtgtgtgttttggtagatttgaacatgaataagatagaatctttgtcctcaaacaccttagtattttgttataagagacacagaacaagtaaagaagcttgtagaaacacactgaaagtagatgcgttagatgcaagctgggtgttgtcagagtgaagcagtgaggagaatggagtggtcatgggctcagaaggccatgctcaaggctgtagacaaggacctgatattgctaacccattgaacagactcagccaggccagttggtagagaaacttgtgacactgggtccaatactacgcttcccccttgaggaatgtcagataaactggaaaagggccctctggcctgagcctgtaataatggtctgttattaattgctattaagtgtatggtacagattttcatttcagtgctaagtcatcttatatgcccaactgtctgttggtgatgtagtgtggtcatctgttttacatcattagaacattaaaagactattagtcataaaaaatggacagatggatctagcagagggcctatgtctttgcaaaatcacccacatccaggcgctctcgtcatacttgagtatggagtgtgttaagtgcagccttccgggcctgaatgggtctcactaaagccaggcagctcccgttcctctacttgcactctactaagtgagacagaaaagttagcccagtgctgcttaatccccacagtgtttctaataataataatgtgccactgttcaaccactgtcagagacagagagagccttcctcccaaacacacttgatcaccagatttcacaaattccatatctgcttccccgcagtgccaccaaagaagtgggggcttgttctgatttctacctcaacccaacaagtccagtggctccttaaggaaggcagggtgtgatttgtggcataatgagaacttacgttacagcaaaaacctcacaagcttcttttgaaatcaggaggccaagcaaaggagcacacagaaacagtgttgtttctagcgctcagaagccaggccaatatttatgcactcagccagctatacactgctggctagcagtctgtttaggaatattgttagaaaaatctatctcccttcccccagcacaaatggaccattaccaggctactcttcttaaacagagcagatctgttgtagagatagttattgagtatctggattcaagtcctaagatggtaaagttaagctgattactggactccaactctttctatatagaactctttagctcatcccataatcagcctccaaacgctgacaccattgcatacaccagcaagattttgctgaaagggccctgatattagctgtctcttgtgaggctatgccggggcctagcaaacacagaagtggatgctcacagtcagctattggatggatcacagggcccccaatggaggagccagagaaagtacccaaggagctaaaggggtctgcaaccctataggtggaacaacaatatgaactaaccagtaccctcccagagctcgggtctctagctgcatatgtagcagaggatggcctagtcggccatcagtggaaagagaggcccattggacacgcaaactgtatatgcctcagtacaggggaacgccagggccaagaagtgggagttggggggggnnnnnnnnnnnnnnnnnnnnnnnnnnnnnnnnnnnnnnnnnnnnnnnnnnnnnnnnnnnnnnnnnnnnnnnnnnnnnnnnnnnnnnnnnnnnnnnnnnnnnnnnnnnnnnnnnnnnnnnnnnnnnnnnnnnnnnnnnnnnnnnnnnnnnnnnnnnnnnnnnnnnnnnnnnnnnnnnnnnnnnnnnnnnnnnnnnnnnnnnnnnnnnnnnnnnnnnnnnnnnnnnnnnnnnnnnnnnnnnnnnnnnnnnnnnnnnnnnnnnnnnnnnnnnnnnnnnnnnnnnnnnnnnnnnnnnnnnnnnnnnnnnnnnnnnnnnnnnnnnnnnnnnnnnnnnnnnnnnnnnnnnnnnnnnnnnnnnnnnnnnnnnnnnnnnnnnnnnnnnnnnnnnnnnnnnnnnnnnnnnnnnnnnnnnnnnnnnnnnnnnnnnnnnnnnnnnnnnnnnnnnnnnnnnnnnnnnnnnnnnnnnnnnnnnnnnnnnnnnnnnnnnnnnnnnnnnnnnnnnnnnnnnnnnnnnnnnnnnnnnnnnnnnnnnnnnnnnnnnnnnnnnnnnnnnnnnnnnnnnnnnnnnnnnnnnnnnnnnnnnnnnnnnnnnnnnnnnnnnnnnnnnnnnnnnnnnnnnnnnnnnnnnnnnnnnnnnnnnnnnnnnnnnnnnnnnnnnnnnnnnnnnnnnnnnnnnnnnnnnnnnnnnnnnnnnnnnnnnnnnnnnnnnnnnnnnnnnnnnnnnnnnnnnnnnnnnnnnnnnnnnnnnnnnnnnnnnnnnnnnnnnnnnnnnnnnnnnnnnnnnnnnnnnnnnnnnnnnnnnnnnnnnnnnnnnnnnnnnnnnnnnnnnnnnnnnnnnnnnnnnnnnnnnnnnnnnnnnnnnnnnnnnnnnnnnnnnnnnnnnnnnnnnnnnnnnnnnnnnnnnnnnnnnnnnnnnnnnnnnnnnnnnnnnnnnnnnnnnnnnnnnnnnnnnnnnnnnnnnnnnnnnnnnnnnnnnnnnnnnnnnnnnnnnnnnnnnnnnnnnnnnnnnnnnnnnnnnnnnnnnnnnnnnnaaactttatatgccccagtacaggggaattccagggccaaaaagggggagtgggtgggcaggggagtgggggtgggtggatatgggggacttttggtatagcattggaaatgtaaatgagttaaatacctaataaaaaatggaaaaaaaaaagaaataaaaaaaaaaaaaaaaaaaaaaaaaaaaaaagaagttaccaagacttgtcctgcagccacctctgcccacacctccccatgctcaccacagctaagtccccattaccctggcaggtctgtaccctgagagaagacagcccaagttcgtatacccccattgagctgtctgtttaaaagtactgggtacagtgcaggtgtctcttcttagtactccatccgctagtagtggaagatgatctcattaactctcagaccatctgagaaaccgaacccaggttctatttaagacataattgggcgtagccctgaggcacttctgatgagcaaatcacaggatcaagtgcaagggtttagatgggggctctgtttatgtgtgtgtgtgtgtgtgtgtgcgcgcgcgcgcacgcaagcatactcaattttattttagaaactgaaaaatttgggcctgtggctaatatcacttttctttttcctctacaggcatgaatgctttacagttacagaatctggcaacactggctgctgctgcagctgctgctcaaacctcagccaccagcaccaatgcaaaccctctgtctagcacaagcagtgccctgggagccctcacaagccctggtgagtgagaagcttggctcttcaccacatgacaagatctgtgtgcatgcatgtcttcatgcaccctgaggcagggagttaggttggtgtcgggaagcctgcacagggtctctggcttatgatagttcctattttcttaaagagaaacttgaatggatgtgtttattttccaagcataaaacgagacaagttttcaacgaagaatttcacagtctctttatttttatgaacatttcctttctttcttccaatacttaggtattaattactacagcaaccctcagtctcacgctccacttttgtctcctgttctcttaaaggggaaaaagtttaagaattttctactggtctcaaactctgatatcttcggtgttgactttcgcaccaactgtattctgtacctttgagtagtaaagggcaatgtgcattcatttatggtcacatgctgacttatataattggatatcttttttccttagaaagtttgttggccttactcaagggctagtaacatttttttcttttttgtacaagaaagacctaatagggttgcatacttatcatgaattatatcctctatttttaaaaagtaaacagaaagcagagtgtgtccttggctttcttctctggatttcctggtcctctcctcctctggaacctacgagggagtgtgcttcagcaatcttgcttctaactttgaaaatcccgtgaccttctatcacctgtgtccagacgattagctaagtggtgacagaactttattgtaattgtgcaaggttttattatgggaaaataggaaatgaaagctacagcatattcccaaaggctttctcaagaagtctgacgtcaggaagcaatgagagatgctcctcagacctgtaggactgaagggagaaacagcccttgggtctttataaagcattattcatctagaaggaaaaacccaagcagtgtttataagaatctcctgaatttatccctaatgtgctaaaatctctagacaacagcccatgcgtatggtgatttaattctttcaagtattttaaaaatacaccattactctatgtgggttttactttttggaataaatgatattcatgaaaagtcaacttttggggcgggttggttttcacgtttttattagagggcaacagggacggggcctcttccatcaacaggggcattcacaggttctgcagccagtccaggcttgggcccagaggctcctgagggcccagaggctcctgagggcgtgttcccatgatctcgcacaggcagctgggagggtgtggctgttgtgagggctatccatggactgtcggcactggctcctttgtccaggtactcattcttgaggaaggtgaagattcttctggccatcctagtcttcgtggagactggaaagtcaacttttgacaatattttcaagaaatgaacgtatagctttaataactcctttagtgaccctatagtaactacttttccttattctgggaaaaaaaatcttaagcagaagttttacttgctcagagttcaagggtataagtgtatcatatacatacataagtcatagctacaggaccttagactgctggtcacattgtatctacagtctgaagaaaggatgaatgctggtactcagctcatggtctcctttttatttattagcccctcccgatcatagagcagtacaacccactttcagttaacgtctctggaaatattctcacagacacagctaaaggtttgtctcctgggtgtttctagatcttgttaagctgacagtcaattttaagcatcacaaacaatttaacattattatttctcccttatgaaaacaacagtgatttccttaaaatatattacatgtgaaaatattataattcggtaagtaatatctgtaaggtatgttataatggtagacaatgtctttgtggttaaaaaaaaatggcagattgaaccagaaatacataatacttaagagtctttaagtcttcaggagacctcagaaaataagaaataaatattaatttaaatgacataaggctgttgatagtgataaaacacaataaggtatacagtgaaggatctgaaggacgtaagccctctgtcagaaggtagtattgtgccaaagcctgaatgaagtgaaagaaaccatgtagtcttcaaaaaaggacagaatgcagggaggnnnnnnnnnnnnnnnnnnnnnnnnnnnnnnnnnnnnnnnnnnnnnnnnnnnnnnnnnnnnnnnnnnnnnnnnnnnnnnnnnnnnnnnnnnnnnnnnnnnnnnnnnnnnnnnnnnnnnnnnnnnnnnnnnnnnnnnnnnnnnnnnnnnnnnnnnnnnnnnnnnnnnnnnnnnnnnnnnnnnnnnnnnnnnnnnnnnnnnnnnnnnnnnnnnnnnnnnnnnnnnnnnnnnnnnnnnnnnnnnnnnnnnnnnnnnnnnnnnnnnnnnnnnnnnnnnnnnnnnnnnnnnnnnnnnnnnnnnnnnnnnnnnnnnnnnnnnnnnnnnnnnnnnnnnnnnnnnnnnnnnnnnnnnnnnnnnnnnnnnnnnnnnnnnnnnnnnnnnnnnnnnnnnnnnnnnnnnnnnnnnnnnnnnnnnnnnnnnnnnnnnnnnnnnnnnnnnnnnnnnnnnnnnnnnnnnnnnnnnnnnnnnnnnnnnnnnnnnnnnnnnnnnnnnnnnnnnnnnnnnnnnnnnnnnnnnnnnnnnnnnnnnnnnnnnnnnnnnnnnnnnnnnnnnnnnnnnnnnnnnnnnnnnnnnnnnnnnnnnnnnnnnnnnnnnnnnnnnnnnnnnnnnnnnnnnnnnnnnnnnnnnnnnnnnnnnnnnnnnnnnnnnnnnnnnnnnnnnnnnnnnnnnnnnnnnnnnnnnnnnnnnnnnnnnnnnnnnnnnnnnnnnnnnnnnnnnnnnnnnnnnnnnnnnnnnnnnnnnnnnnnnnnnnnnnnnnnnnnnnnnnnnnnnnnnnnnnnnnnnnnnnnnnnnnnnnnnnnnnnnnnnnnnnnnnnnnnnnnnnnnnnnnnnnnnnnnnnnnnnnnnnnnnnnnnnnnnnnnnnnnnnnnnnnnnnnnnnnnnnnnnnnnnnnnnnnnnnnnnnnnnnnnnnnnnnnnnnnnnnngagaggagaggagaaacaggcccatgttactggatccatagctgtttgtgttagctctcccatcactctgacagaatgaatgcctgacataacttgtcttacctatgattcagagggttcagtccacagtcatttggcactgtttctgagcccatcacaaggaacttcactgttagtgggagtatagatgaaagggctatttgtctaatggcaacaggaagtaaagacaaaatacaggaagtggccagggcaagatacaacttctaacatgtcctagtgacctacttcttctaggtaggttcctaactccagaagttaatataagttaacaaaatcatgccactggctaggggataacttctcaacatatgagtctataggagacttttcagatacaactataataccatttcagccaatactttaaaaatcacgaattgtttattttgtattgtattttggggtttttaagacatggtctcactgtacacctctggctggactggaactcagaaagatcagcctgcctctctcctaggtactggctttaatacatgtgccaccatgcctggttgtgcattttatttgaactttttaaacacagagggtgctcagtctaggaagatggcctgtgtcagaagggaagtttaattatttgagaacatctcatattcttatagccagagagaaaatgtatttgaaaatgtttttgcctccctcctgatgttgtcacaatgtcccattagcaatgagtccttctcagtcttcctggagcagcatgctgtccttcagtagatgctgctgcctaaggaccactgacaggggtttccctgcaaagaacactcttcataatagctaagaggacttcattagaccctctaagtatgacagaaaaaagcaatttaaaactaattttttgagtatttttcctatgtaactaaaaaaaaaaattttttttaaataaaaataaatgtccttaatttaagtgaaagtccctaacttccaccagggactttttcagagatgtagaaaatatgattagtaacttagtaacattcctgcctctattcttcaggatgatagcttataaaataaagtgttacatgccatcacagggatagtgctatcactcatattttaaaatgatagtccagtgtgttcactgtctgtaccataaacagtcctactataaaatacatgaggcctcatcttttcacttctacacagggcttgaatttaccctgtgtttaaatatgtctcgtaagttccagataaattcatctacaaaggaaaaggacaatttaatccccaaactattaattttttcataattgtaaatttatcttttcaattttgcatactgagaaaaagtctccctacagcattattataaatgattttaaatagtcttggctttaaaacatgaaagattaagccttaatttttgttttaaaaaatccccttaagcaataaataggttcctttgtctcatggccttgaaataaaaattaaaatagtttaaattgcctgtggttagaataagtgtttcatgcaattatcagatagtagtgaataaaattagaaattaaatcatgaaagactaaaaggcaggtgagtgcatattgttccctttatgagctcctcgtgggtcttctggagcctgatttaatcgcgcttcttttcttttgatagggtaatttttcctttatttacttcagtcgtctatttggttaattaattcttgggtcatttcttattacccacttttgaacctgtttttgagaatcatgtttgttttctagaaagagataaactgtatgtccagcagatagctaggtataaaaggcagtaatacttgtctcctacagtgtttatagatgagttgtttttctctggtaatgttcagagcttggaaatcagcattactttcaccatatgtgaacttttctttggcattttctgtctaaaacctaacactgcaataccatacttgtctactgtgttatttcttagcctcctgttttctttctttctttctttcttttctttttaagaaaaagatgttttaaaattctccaaatgtttctgtaagtgcagactcagtcaagtgcacacttgaagataatggataatttctttcaatagcataagccatcttaaaatgtcaggaagcattactttattcccagtgctggctcttcaaagagtttccctttaaactctcggcagtctttctccctatcttcaggctccttgaggactgcaacagtctgagttccagggaaatattgatgcgacctggtggagcacttaaggcaagagaaaggaaggggtgttctcatgggctcaggccagtcatgcccctcacacacagatgactgcatccttgtcatatctgtgccactcaggcagatgcatataacaagatacaaagtctgtccctagagtctattatcctgcagcctttcagtgtgtagggggctttgttgtcttaaacgtgcctgtatctgcatcaccagaaaacctgtgcactctggaaaaaagtgattcacagatttccgagtcacacttaggagcctttcagtgtggcaagtgtattaaagtgtgctaggccctacattgctcccaagcagtgacttgtaggtgtatgcaaggcccagagtcagagatagaaaaggcacacagtgacccctgagcttcaggaagtccatgactaggcatgtccactgttcttcctgctaccttcctactctgtgcatcctgataggtgcactgcagagtctcagttctgacatggcagcagcatacctcatcggccctcagcctgcttggtccgtcctactaatgccatctctccccgctgacactagcctaatggagagccttgttttcacttcctctatcactacacaggccccaatgcaatttccatgctctaccccgttgagcactttaaatttggctctgtgtgatctaggctaataaaacaacctccttagtgtggctttcccggtcttgtctggatgttctttcttccctgctcctggggtgtcacttttcatcatatgcctgctgtccctccttcttgcactctgccttcctagaatgtcagcgttcctcctttggctcattcttggaaagttctcagccgtctcctgcttagagcagagcttgttcttgacatggcatgtaggggtagaattggtttttggtttgtgttgttgagacaagatttcatatttccctggctagcctagaacaactcccatagatctaccagactctacctcctgactgctgggattaaaggtgtgcaccaccatgccagcttacaaggggcttttttaaaaccacatattactacttgtgtaaatcaaactgcagtaaaggatttttttaattgctaaaaattgtttcaaatatctcagtacttacattttaataatcagtgcacatgtcttcctcatcaattaagttttccatggaatatgattatcactttaacataaatgcttacctaagtctaaccccgagttaatagaagttccttcaaagggacctcccaggaaggtgctccttgagggcagaggagatggaagagaggtgtctacatgagataagcatcctgtgaatgtcgtaccacttttctttcttctgccaaagtgcacgcttcacactccattgtaacactcaccgtgtctctgtaagataattatttgaacatatgcctttgtcccacactctagtcagtagttctcagccttcccaatgctgcaaccctttaatacagttcctcaggttgtggggagccccaaccataaggttgttttcattgctacttcataactataattctgctgcttttatgaattgtaatataaatatctgatatacaggatatctgatatgcaactccatcgaggtctcaacccataggttgagagccattagtctagataggaatacactttcaaagtagaaagttttttgttcatagttcccccttgatttgaaacatcacatcacactagtttctaaaggcttggtttgtttgtttctttctttctttccttttggttttatttagttttgatttgacttttttttttttttggttgttttctattttgtggtttttatttttcgaaacagggtttctccgtgtagccctagctgtcctgaaactcattctgtagaccaggctggactcaaactcacagagaactgcctgcttttgcctaggatttttttctgctgttttgattttttatgacaagtgaaaagtctgcatagcatgtataagcgccactcattctagtctggtacagcacatgcatctctgaggagatacccaaacgggtcagtgacattgacgaggtcacatgggacttagctcccgaggatccttccttctaacaggagacagaagtaatcaatgctgacaccttagatcaaagtcatctagggcaatttggcctttttattacaagattcttaccaagcatggctttcagagtgttcttatttcataataccacggactgaaaggtagactttgaagaatgacataatcatccttagcaagcatctatctgttagttacatggcagtactaattccacattgcaatggaatacctacagtggttagaaaaatatgagatccatttagcttagagtactttttacttgtaatgtacttataaaacatgggccattttattagtgcagggtccatactcataaggaatatctcagtttcataccctcccattgctcccctcacacttactgtttttcgttgtttattattacaagaaggaaattaatcacaaggcagtcagctcgccctatagtagctgtttttgtatgtgctttgattaggcagaatccaaacagtaaaacaagctacttatttgtggggttgaggcagtcacatcattcttactacagaaaagattgacattcactccttgtctcattgcttctaaggtgtactccctcgtttctataagtttcaacatttttgaggtactttttctaaaagttttccacgtctgttcttggtcctgacattatagagctcaatggaatcaagaattacacgagcttctattagccaaaagacacggtagtagttataatctcctgttgtagtgttcacccactcagcacatgcttgttgaggatctcttgtcagcctggagttcctttcccctttctttacgttatgtatatgaacattctgcctgcccgtgtgtatgtgcacacaactggagttagggatggtttgcaggcactgtgtgggagcaggatttaaacctgagatctctgcaagatcaagtgctgtaagccactggcctcatatctggagttcttataagtacttaacacattggtaggtaaagctgacaaaaagtcttctctcatgctactgctagttttttgaaaactattttttaataagactccccatagtaaaataactttagccacctttaagtataaattataatttttgcactcttaaaacaactttatgtaacatttttataccttatactaaagtttttgacttggatagaaatgaggaaagatccttctctagtgttcttatcttcttcttttttctttttcttttcttttctttttttttttttttttttttgtatagaacagagtttattcatggcatgggtaggggaattaaaagggtagtagaagcagagaaaggagagaaagagagggagagagagaaagaaagagagagagaagagagagaaagggagacagagagaagaagtagaggccggccatgaccctgtggaaaggggggaagggaatgcagagaggggggaacaaaaaggagcaagaggcaagagagataggggagcttttcttgtcttctttaagctgtatgtttttctatgtattcggtgtaaccaggagctctgggtagatgttgtctttatttgtagatttgacaagaaacaaaactagaagcacagggattttgccctgggaaagtctactcccactcttgcttggtaggttcccagaagaagcagcacatgataaccaagggtgtattgtttttgtctaagatattaaaatctgagattctgaaaaccagatagttagaaatacagtagtcttccagggagagttcactcagacagggatcaggcaccgtgagtgagggaaagcatgcaaatatttctcaaccagacttttttcaaaacagggagcctcctttaaattacacctttcatcaaggaaatggtgagtttagggatgaagagttatctcggtgattaagaacactggctgctcttccaaggtcaattcttagcacccttatggcaactcgcagccctctgaaactccagttccaggggatctcgtgccctcttccagcttccacagataccagacacacatgtggtacacaaacatacattcaaggaaaacattctcatgtttaaattttctttttcatttttttattggatatcttctttatttacatttcaaannnnnnnnnnnnnnnnnnnnnnnnnnnnnnnnnnnnnnnnnnnnnnnnnnnnnnnnnnnnnnatgagggtgttcccccaccccccacccactcccacctccctgccctagaattctcctacactgggacatctagcgagccttcccaggaccaaggacctctcctcttattgatgcccaacaaggccattctctgctacatatacagcctgagccatgggttgttccatgtgtactccttggttgggggtttagtccctgcgagctctggaggctctggttggttgatattgttgttcttcctatggggccacaaaacccttaagttccttgggtcctttctctagctcctccattggggaccctatgttcagtccaatggttggcttcaagtatccgcctctgtatttgcaaggctctggcagaacctctcaggagactacaatatcaggctcctatcagtaagtacttgttgccatccacaagtgtctgggtttggtgactctgtatgtgatggatacccaggtggcgcagtctctggatggcctttccttcagtctctgctctacactttgtctccatatttgctctcgtgggtattttgttcccctttctaagaaggactgaagcacccacactttggtctttcttcttcttgaacttcatgcggtctgtgaattaagtgggggtacttccgtccttcttaggaaggctggtgaatctctgactttgaggccagcttggtctacaaagtagtttttcaaggacagccagggctacacagggaaaccctgtctcaaaaataactaaataaataagtaaataaaataaaaaaatcctaccaagctgagggtctgttggttttttgagacagggtttctctgtgtagtcttggctgtcctggaactcactctgtagaccaggctggctccaactcagaaatccgcctgcctctgcctctcaagtgctgggattaaaggcatgcgctgccatcacctggccaaagatttatttattattatacataagtatactgtagttgtcttcagatgcaccagaagagggcatgagatctcattatgggtagttgtgagccaccttgtggttgctaggatttgaactcaggaccttcggaagagcagtcctgtgctcttacccactgagtcatctcactagcccaagcagaaactttaaaaggataactaaaggagttttcattttatgtgtggatcaattcatgaactccttataaattatgtaccagagacacatagaaaaataagcaaaatgctgcaaactgtaagacctagttggagagcattcagacaggtaaagtgcaggtcagcagcagggaggattgtcctgggaagtgagaatttggaagagagaacctctccctagaagactgctgtatttctatttggttttcaaaatctgtatttctattttgttttaattatattttaaatataagtagatatttaagccaaaatcttaagaattaataggatttttttacaggtagaaatagaatgaaagacttatgtcgaatgtgatcatgtaggtaaaatgatctgatcagaaaatggatcttctcatttatttcaaagtatgagatctacagaaaatagtaactatggaggactctgagagctgaagcttagggacagaagttgttgcagcattgaagagccatccatgtgtggacctcagccctaaggatgtcagttattagacttagtaccagtttgatgtgaaaaagatcagaagaaggataagagatgaccccagcttgtgcagttctggtgagcagcagggcagtgcttgtggtggtagaaaggtgtttaaggggaaggatacctttgtagtatgcaatggtttgatttatcacatgacaaactgagccttgctgagatatatcaaacaagttgactagcttatcctcacagctgaaagtgaactgaaaatcagctacagggacaaagctgcggaataaaacttaaagtaagtcataaaagtaccatctacaagaaaatagaggtctgtgtatataaacccttagtttctgtacttgtggatagacagatggagcaagagatagaaagaagctcctcaaatgatcaggtctcaagaaagtcacacaggtcggaacaggtaagagcagcagagtgatgttgcggttgcttctctgcggaatagtcacctatctacactagcagagcagaggacagctctgtgggcagagaaaagagagctaaagactgaaattgcagacaactttttcatggaatttggagatatggcttggcatttgaaggcatatacgtctctaacagaggatatgagttaagttcccaacacctacttcaggatactgacaaccatccagttccaggagatcaaatgctactggcttttctaggcatctgccttcatatatgcataccccaccccacccctcatacacacatacagagagagaaaagggggagggagggtgagcgaaagagggggaaagagagaggagagagagagtcttaaaagttttcgagaattgcatcattgctaaggaaatggtttttaagatggacaaaacatacatatttttctagactgaacagaagaatccagaaacaaagaagatgtaagtgtggcactgagggagggacttgggtgggaaggcagagtggagagctgtgacagtcacagtcctatgctgacctcacagatgaatctctctgataacactgccagcccttgccttttccactccccaagcagctaagttcacaggatataggcgggccttaacacaaagaactggtacacttagagctttccaactggcaccaagaagtctttccaaggattagatgttagcctggccattctgcccagtactttcaacccagctaaataggacttacccctggaagtcctcaggaaacaaacgaaaaaacctgggctcactgggtcagtatttcaaccccagccaagtgtattggagatactgccttgatttgtcaacctggttaacatcttacaaatgcctttcccattttcagatctacttccaaagcctgttttagggactgtacttggaatccatctccttttctgtgtgtatgctttccaaagtgataagaattgggggaaaatgcatccatagccaggccagaacatctcagccacctgggaagctgaggcagaaggagcacaagtttaaggccagcctagtcaacccttagtaagaccctgtcataaaacagagctgaggctatttctcgctaatacagcacttgcttagccttctgtacaattcctagtactgcagaatatggggagagagggggataactcattgactgtaaacctggacttggaacagttaaccccgtaagtctgactatgactgtgtgtcgtcttgcttaaatgagcctgccggtcatggactagaaagagcctctgagacatgaggaaagctcagcagaattgggaacataccagaaggcaaagcaggaaagcacttatctcacatagaggtgaaatgtttagtatctaggtctggaaacaaagattcctaatcagggtagacgtttaaaaaacagtaaaaaaaaaaaaaaaaaaaaaaaaaagtatgcccttgtcattatacagaatgctgacaccttgagaagaaagagtcggtggagataatcatttaattttctcacttgtgagatggaattgtttcactttcctcattgaaatatcgagttgtggtatacgtgagtttatatacatatatgtgcatatatatatacacatatgtttgcatacagcactgttcctggagaactgaggaaatcaaacacttctgcagacttcctaaaagtgctagaatgtgactagaaatgctagtgctagtttctcactgtttccctttagtgcttctacagtgcttaaaatgcaaggctggaagactaagctctcccagccaaagacaaaacagtgccactgggctaaacagagtgagacgcccatgtctgtgctggctacttaagagacaaagcgttgctgatgtgcattctcttactgataagctcccgtctctgtttccaaaggacatgagcttttgagactctgttacccaaagggaagtctctgtcagagcagtggtcatcctcttacctgggaaacctctccctttctcccatgaggaaggccagacattaggcaggtcatcagtaatgcagatggcgtgggccctctttcctcacactgtgtttcccggggccacagtctggtcatatcttataagcgcaaaagtcctcatggtcatctctccagacaccttcttcatgatcctgacaaggagccagaggctaaaggatcgtttgtcagaggggagaatgtttagttagcaacaggtgctgagacagttacttctgcactgtgagagacttgagagcaggagtttctggaaaacaaggcctctattgttggacctctatattcccatcttctcactcctgtcagtagctgtcaacttcattttcagtctgtaggcatgactattgtaaaagcacaagtctgtctgggggcaactgagcagggtaacatactttgttaaagacaggatctcactaagtatctctggctggcttggaactctattagaccaagctggccttgaacttagagagatccaactgcatctgcccctgcctcttgccctcttgccctcttgccctctgccctcccgccctctgcctgcctgtcgctgcttcccagttgctggcacgtggcatgccccaccacagctggcttagtacttctatttttataaatcacgaacaaaataatatttaggtatcaatatcttttttcctacgccattcttaacagacccgtgtgaggtaacattatataaaaggactcttctaaacccaagccctcagaggccgttttcattcttaagtgtgtcttcttgggactggaaaacatactaaaaataatacctggcttattgacagttactgtgatagaattctttcaagtaaactagtgagagttccagaaggcgtttggaaatgaaaattaaagctgtgaagtaattgagacagcgtagtatggtcaaagtatgggattatccacattggtttcccctctcccaaaattttggctctcgaataaatatttcaaaactaatttcaagtcagaatctagtgccgagacagaatttttctctctctgaccttctagagaagcctctgtctcagtgcagcatcaagtcacatatacttcccaccgaatgggcagtgaaaggtgtccccagtgtccatggggtaaaacacagaccaccacagatggtcaagtactgagcggacactgactggaaactttttaggctattgtctagcacactcttacaccctacccccttctcaaaaacctcttcagaaataagttaaaataagaagtatggttattggagaataattcagcccccaggaggagagacactctgttacttcattaatgccccgggttgtgattagctaataatgacaatacctatgtcactgcatagttattctgctgctcacattgtttccctgcactgttggaatatagcatccaagctgatcagagacaagacagcaaccacaggcttcagtcttatatttagtagatattttctctgtatttacaattgttttgtttcctaaaccacaaagacactgctttcacgatctaattattttgtggagagtggttaatgaatgcactgaaggcaattcttgctctttctgctactgttgttttatgtagcttaaaagaaaactcttcctgcctggaaaaaaatgtagggaagaggatcagtatgagaaaatctgggttttccctgtgaatgttctgtagagttgtgctagctatgacctgcatgtacacaagaaaagagaatgtcttaaagaagaaaagctcttccgtaaagaggtggccagtgtgaaacatgaacaaacccgtaatgcactttctctgccttccatggcgtatctgactcgttaaaggattaagtacagaccattctagcagtcagtcttccccaagcaggaatgctgtttactgtcctaccttctgtagactataagaaaggaagcttcttggtgtgtttccaatgggtctccgggcaagtgaagtcaccacatgggtttggatttgggcctcccatcccctgcttatgcatatgggtggctgcttgcaagctgagagtagacatgtattcatgacctcccaagagttgtgtcagaagaatggaagtgtctctgcccctattccggtgacacgaaggcagtatctggcttcttcagttttatttttaaataccttactttatttggcatatagcagaaagaaagtttggtaagtcttcactgagccactgcttcttctgagtcattaggagcccatcagtaaggctgtaaccccaagagagatgtgcctttacctgtctaagatctgcaaatcagctttgctgtaagaaaacaggttaagaaaatcctagccccctgcctcggccttccattcattcatttagcagatacttaggatctactgtgtgtcattgttctgtggttctaggaaattaaaacaggcataagcctctattctttaatatacttgccttctagtaagatttttaatacaaagaatagaaccacacctattacagtttttttaaactctcatttcactcccaactgtttttgtttttccggtcataagccaaacctgacctctctccataaaccttcactgtcatatgactcaaagtaaattttatacgaaaccagttctatgggaaattaatagaaccacatcggacatccttgagaccaatgtttcccaatcattcatacaaaagaagtatgaagatggttttctgaaatcagatttctgagagcccctccctcacactgtgtttttagtggatttaatgagccccaaggatctcctggttctgatgtgggaagtcctaactacctcttaaaaacaaacaaacaaaacctttatcactaagtgcatatggttacagctatctgtttccaaaacaaccagagcaactctgacaagatggcccagatagcacctagcctcactggcttctgggtttacaacacagaaatctggcctttgtggtggttcatttggaattggagaggcgtgtgctagtaaatatcccttggacagaagacagaaattacaaatatgacaagcagggtgagtcataaaactgcatagatacctttgatcctcactgtctaaatagagctgagcatttcacatcttcatttatgtcataagtaaaattggaagctttccaaaaattgtgccttgaactgtgagaattctgcctcattgaagtgctcattttggagatggaagccatgtttggaacaaataaaaaatgaagagctttttaaagctgactgaagggatctctgaggctaccaaagctagctccaaggtttgcagcaagcccttcatatgtgattatttaggtctctgcattcatatctttacaagtagatgcaacattcattttagacgacatctattctcagctatgtctccatattaacctgaaatctatcactgtaatttccatccactgatcctaattttaatctccctaactacaaagaatacttattgatgtcagaacctaagactgtttcatcccttggttttctctttgtgaactaaatattacgttttaatctttccccttccttaacttccatacctgatcatcttcctggatgttctcaaaactacacagtgcacatgtttgagggatgctgtgtttctgtgtgactcggttagcagtaaaagtatggagtttgtcattgtttatctagcttccaaagggtggggaagcattggatcttcaaatgttgctgaatgatgctgtggtggtaaatttttcttcaggacagaatggccagaggtttcccagcagtttcaccccttgctgtatagcaaacaccattgccatcccgtctgattctcgtgcccattcccacaaacaaattctagtgctgcttctttggggactaatgctaagcctcagttaaattgagattccctactgtctcgtagattggaagcaacagagtcaaaacattaaaggtagatctaggacctacaagcaaatttgttgcctccataagtaaatctctgcaatacccacaaagtcaatccaaaacacaaaataggattttaaattaaatgtcaacaaagtgttaaccctctacagttaacgcggtgcatgtaaatctgggctcacagtgcctagcacctggtatgcactcaaaaggtattagatgccagcattattagtgctgttcctaatgaaagtgagttctccttttctgttactgattaccacaagtgtatgtgcttcacaaacatcttaaagttctacagaaaaataatgcagcctgacatcagagtccagccagtcacattccttcccaagcactcctttttccagcttctggccactgggccctgtctccatcttcagagccagggactttgggccagatccttctcatgctgccacattcctggagttttctcttccagttctcacttccacttttatgggaaaatgtcctcatttcagtatcagccagctagcaactcttaactccatctttagcttgtcttcatcacgcacagcctagcatagtcacaggttctaggaattaaagcctggacagttaaagctctcaagaaagagctttgttctgcctacatctttcttgaaaaatagtctgtctaggaccaaagcttatatgcctacccagttcagaaagagaatggcttggtgttctttatcaaacatggtgccttatcaaagcaccgtgccatcttgtttcatgaagttcaatgctcttgcgctggtcatcgtagatgagtgtaggatctatcttgcccatctctccattccaagtagtcacccatcttcccaaaagcaaagtgaaaatgatactgggagaagagttatggtcttttcatgtttcgaaatctagggaaaggaaaaaggcatttatctatggcacaaatcacctttgaaagaaaacaaactctctattgctgagattggagctcagatccgtgcatatggcaaatgtgttctgtctctgatctgaacccctcgccacagatgaaactttcttaataaggattactaatgctacctgtcctcatttgctggttaaaaaaggatttctgttttatatctgcatgaaaagtcatgtggtctttctgtggaccctgttcacagctggaattctagctgccatatgtacccctcatatgtactgagtcaatccattcaacgctgtaatctatgctttttatccttaaaggaaagacttctgaccacttctgaaagacaagacttttctattatatttcattttatttccttttagccagcttgctgaaacctacaagctggtaggtaggatgtaacctgtaaggcagacctcaaatgtcatgtatgacagtcgtcattgtcacaacataagcaaagtaaaacaatattgctggacccacttgcatgcctccttaacgttgctctgcagcctctcgtatgaaacaaagcagcctcctatccatagacattcttggaaaagcagccagcgtttaaacactacacatttcctggagtgctctttttgcattttgcaaataggtttagtgagaaagtgaaagacttcagtggatactgaagagaagttcaggaggacaatgcaattgcctaagtcagcccatggccagtctactaaccctgaaacaggaaaatgtgggctgatggcatttagtttgtttctcggttacgttgagggttatcttctatattgtgcatctgctaaacatttagtttttaagtgcatgactgagatcgtccctgtgacaaatctgaatttaaacagattgttaaagtttaaagggttttaaaggtaattccacatgcaatagaaagatctctttgcaactaagactaaagttaggacaaatttctaaagtattagccagtgatacagcatacatacatagagtcctctcactctaaggcacttcatgcaggtactatctcatagtttcatacttaattctactctgctcctgttctttgccttcttctactaggatttccagaaaaaatagtacaagatgatgtgaggactgtattcaatcaccttactatagtcagtcccaagtgcttttaaattaagtagaaagcaaggtgtaaaccgacctattctttacaccctgcttcttcatgattcatgacacaatggtctggtggctccaggaccatcccagcaccactcatattccctaagcacaggcttgcttggaggacctctaaactcacctctcaaacctaaaaaaaaaaaccctcaaatcatccaggagtcataggatccaccagttccagtgtcattttctctcttgacaccgaatgaaactcttgagatgaagtaagctgctgttgagtatacttccttctgtcttatattcacttatatatcggcaggcagtggacagcttctagcaacacgtttgtcagatgaccaagggcctgaatttcctcctgtccatgccctctgcaaatttgttttctgtctacttcccagactctgtgaggattatctcatgtctcagcctgttgtttccttcacatctctttgctatgagtagtgtgaggaagagaaagaaaaatgaagctctgagtgaagtcagacttgtgattggcatggtaccattagcactggaggtactgtactgactacatccatcagaaagaagtccttgtacttggctttggccctgatgaaatacaggctttgtcaaaatatatgaaactcctgtgcaatgcaagaggttaggccaatgtatttctcttcatgttctatattagtctcttatgagtgtagccagtgtagcttcttatggctgctgttgacaggatatgtgttttctggtcttttacaaacttatggatctacttctaaaagcagtatgtgttcagtggaaactatacttcaacatttgagttgtgatcttctcctgaggtactgatacatgagttcatcgtttcccatgtgagcagcagtgaaccacattgccagtcatccacacagtcacaagaagaaacatcaggcctccaagctgtgttgctgagtcaggatattcagtagagtggtgtagcaaatacatttccaatttaggatattttccacttttgaattggatccttgttcttttggaagcccaggagcgagcgtctatctgtattttcaagttgtgtatgtctctgaatattaagtgtgcctccttccttagcatagttaaatctcagctggggatttttgttgaatacagtctggtcataaggcgaacctgggtgtgtcctttttcttttttcttgcatgcctattcatttctctagtcttctttattttatattaagtgaatatttactaatacaacatcttaattttgttaatgatttttcatgctttcaaattttattactttagtgattactataaattatcagatcatacatctgatttatcgtcctagttttagtaagattaaaaaatgtttctcatgtaattcccttcagccttttaaatgttatttatataaacaatatgttaaaaacctagcaacataatattataattattttccataatcttatgtcttttagagaaactcaatagaggacagcaagtgataaatctttatatttctagggtatttgtaacctccttatttacaatttctagttctcttctttctcaagatctaagagcttgggcttccatagaattttcctccatcgttctcacttgtttgactgttgtcaaatatattacatttcttataccacatacctaatcatacagttatgagcattttagccaaattatcttagttaagaggaaaaatctaatagacttaattagtaagtaattacttcctctcctattgatatctaagatctcttgttgtaaacctaaaggatttgattagtccttaggagacagagctggtgcctattgagcaatagtttggttttgtttggttgtttgttctaatttgggaattcttttctccatttttggaagataattttgctggatataattttagttggcagtttgttttggctttgcttttttctaacattgagtatatcctgttataaatgcattgattctgctgacaattcagctgactcttccttgaatcctctggtataatggtctttttctttggtgctttcgggatttcctgtctttgacattcaggatttgcacgtgtttatctggatatggatcctttgtgacatatcggtttaccatagttacaattattacattttttgagtgtgtcagtgtctgtcaccaaacttgggaagttattagccatcatgctttgggacatttttctagtctcttctatcacctcttgccttgtgctttatgtatatgttaatgtgctcaacagtataccatatgctctgagtctgtgttcactttttatttttctccctgtcctttagaatgtatatattttttgataacttcaagttcactcattcttatattggttcatatctgttcttgagccctgtggtgaaataagttattgaagctccttttcagctgtagaatttccctttgtttatattctttgcctcattggtattttttgatgattaaacattattgaataactttaggatttcctttagttgagtatctttttaatatcttctttgatttcttcacttgctaagtcttaatatctgaacctctgttgtctgttcttctgctatgtatggattctagctcatttcttaccgtatattatgatgtcttcttaacaactgggcactttaaatagataatagagcaaatctagttcctaatcttcctcattcactcccagactgacttcctggttgtttatttgcttacagcttagcagagttaaagcagtaaggtctgttgctttgcccannnnnnnnnnnnnnnnnnnntggtgcccttcacatcatttcctcaaagacatagccatgagctgagtggcaggttgtgtcttgactcccctcattagctcattgcctgatatgttaggttcctacctgatatatctctcttgtcacctctcgcagtgttgttagcattaacacaattccaaattgggggattttgttttgttcttgtttggagggttggttggttggttggttttttttttttcttttaacccccaaaatctgttaagattaaagccagcccttgtaggaaaacatgccttagctctttctctatttcatcagaaccatcagcccactcaaaattgcttaccaaaaaaaaaaattttgtccccagtagcacttttggcttgaattttcccatctttggttcttccagcctgttttgtactctagatggaaactctgtgttattgcttcagagctggtttaggaaccatggtttgcttttctttgacacctctcatcttcagaagagcttctgtgcattggtcatagattatatgcctcttgacttgcctttcctagcacagacttctagcctataagtgatgatgtgaaggtaaaagtgaggccagtattcccctagcaagctgtttaggggcaagtcctacattcctcgtagcttactgtataacttgtgcagtacagaacagaggggaagagattagggctaattagaaatggtggagtcttttcttcctggaagagccatagtcctggatttggaactgtgaggaggggagccctgctgtctcactctcagttggactgctgttaaactcctcttcagaacggtgatactgggacaggtgatcctggagaagggaacctagtgtagactgtggcctaaataccacagattacctcaattcttacagagacctttacacttttctagtaagggggaagtggatttcttgttttgttaggacagtgtctagagatggcaaccatagctcttataataatctgatactgagagaggatgcacagatggtcttacttgtccctgcagttcttcagtcatgtcacttaaactcacagctaccattggtttgctttggtttcctagtatttatttctgatttagaattcaaacatccatcatgaatagttttcccacctgattcactgacacagtcttgtccaggcagttatgtgtagactaacatcggataaagtctgtgggaaacatgccagatatgtgtaatttagatgagctggattatcaaagagaactcgcactgcaagggagaaaactagcatgcccagtaagatgttgtttgtactttcatcacatcagcgagtagtgaattagtaaaggaagctgagaggtgactgcttaagcaataggacaaactcaggaagcagcacaaccaagtaacttccaatactttagaagtatttggtgaagtagaaaaactcaagcaaaactttgtaagactcctggtgcataaagaatgtgaggaagcttatcgcctatcaaggcatctaacagaatgcctgtggaaccccaaaaggcttaattgttagaatgagatgaagttaggaacttacaaataaaaattccaatctcaaaacttagtgctgagaagtgctttaggtatttccctctgagaatttatagcagtgaacaggcctcccatgagccttatgggtgatcaaagtcctcagtccatttgaaaaggcctgttccctagaactttgtgtgatcaaacggacatcatccctgaaaagacctatcttcaatccagacctcaaagatgtccagaaataatttttcaataatattaaagctcacatttagaaatcattaaatacagttaaaccaaggaccaagagtaggaatcagagggctggcaagacgactcagcagttgaaagtcattacccatgttaggtggcccacaagtgcctataacttcagctccaagggatccaactccctcttctggtctctacaggtacgaacatgcatatgctaatacactaacgataacatataataaataagcagtaaaaatctttttttaaactagcagagtcagagttgggtagtatatctagatcaacccaaggcctctggtattagaactattagagcattaacagaatgcagttacactaatacgtttatagaaacttaaggcatctaaaaagttagaatagcaaatggttactgaaatggctatactgatgcttctagaaatgtaaactgtaatgtaatatacagtggctatacgtctaaaacgactttacgtacagctaaagaaagtttggtgagcaaaatagttcaacattctcctacagtgggactaacagaggataatctaaacttccagtgttgtcattcaaaattttcctcaggaaaccaaatgaagcatactcagtgtgctggtgaaacagatagaggcgggctattgcaagggtggaaactgaaactaaggccttgtgcagtgaggcagagccactgagctaggagcccagcctacctaccatgtgattgcttcagttaccaagtccatgtgccaaatggcctacaagtcagtccctttggtctttaacagaaaaacttgaaggtcagcgacaccgcagttagcctgttagtgataacagatttctttccatttcagttgtttctcactttgttttctctctcctttctctcttttcagtggctgcttcaacccccaattccaccgctggtgcggccatgaattccttgacctctcttgggactctacaaggattggctggagccactgtcggattgaataatattaatgcactagcaggtaccataaacagtgagtatttgctgctctggtggacagccttcccctaaattctccagaaaatggtcagccagaattgaccaaaaaaggatataaaatggggagaactaaaacttgggatggaggagcacatggttcaataggcagaagctttccctttgcctttatctctaaaccagccacaccccaccccacccccagcttctttccactgtggagtatgagatcaaatccttagagtgccgtggtttgacaggtagtctcaggttccaagaagtttggttcagccctccttcaaggcagagtgttataatagaaaaggtaatggagccgggcatggtggtgcacacctttaatcccagcactcaggaggcagaggcaggcggatttctgagttcgaggccagcctggtctacaaagtgagttccaagacagccagggctacacagagaaaccctgtctcgaaaaaccaaaagagagagagagagagagagagagagagagagagagagagagagagagagagagagagagagaaagaagaagaagaagaagaagaagaagaagaagaagaagaagaagaagaagaagaagaagaagaagaagaagaagaagaagaagaagaagaagaagagagaagagagaagagagaagaggtaatggagtggaagttgggaaccataagtccagctttactgccaatcagctctaagagctcagacaaatcacagctccatctctggcctacagtccccactggaaaattgaaaactctgagtcagataatattgaggtgccctctagtttgaaaaagccaaagttttcagacaagaacctagtccctgaaaaaccagaaatgaaactgattgacaaggaggtagtgcaagaaggggaatctttgtcatcgagaacctagagcatccgcaggacagactgaagagggtgcccttagcaagcagcacaggccttccacagagagctcaccaaatgacacttaatcctgaagcaagctggctcatttagaaaggtggctgacctctgcccacacagctaactgttctgttgctcagatgcatgtgggaatagtgcccaggcctgaggatgagccacacttaaagatcacatttggtgtgagtatttgcactagggagactgagcctcggccacaaggacagctagcttgcctatccatttggtccccctggctgcccaggagatccataacagccaacggagtttctgcattgtggacctaattgtctgccaggcagccccagcaatgtaacattgcttcaatttttaatctggggatcctggccatttgcctcactttaagccatgagttagtaagtagaaaactgttttactgaatgatcagaccataattattttaaagcaaaaactgtaatttaaaagttcaaaagataatagcttgaagagaaaaaaaaaaagattgtatcagcaagatggtatggttcaggtaagggtccaacccctggagccccacctagtaggaagagaccacaagcttgtacaagctgtcctctggcctccacaagcatgtcccactcccctcccacacaggcaggaaatgtaaggaaagcctttaaatgtctaaagtgtgtccacgtgaaggttaactcgtgcaatcctagtaagaaaccatattttcataagtagacaatcttcaggtttattaaatcgtttcatttagatgctcgagggaggccgaaaacaaacaaacaaacaaacaaacaaacataattttatctgatcctgaagaaaaaaaaatgtttcctgccacatatgatagcttttgtgatattagcgtatagtacacggcctggtaacctgtgacagcagaatgttttattccagttaaaactgcctccagcttttacatttccagcagccacctaggagcctggaggcccggtcctgtttctggtgcagctcctctttttgaccctgtcctacagcagtgccagcctactgcccttcacccgagtttcggatgtgtgtgcatccatccctcatgctgcttctcttgccccaggacctagttcccctcaaacaaggactttgatttgatcgcctgcctgtccttggtctgcagagtcacaggccagtgggaatggttgtccccctcagcacgtgctctgactgctgtgtgtccacatgtccgtgtcctgtccctccatgcctgctttgttttgtgttgccggccttttcccattcttattgtgaggacccaaggggaactgtgtggaatgatgagaaaccacagctagtccttgtgtggggtcacatgttacacaaagtttgctctggcaaggacaatagtttcaaattgagttgctgcttttcagtttttgtaatttggttaatagaaatatgcatagttcgtgacaagaaagaatgttcttaatttcacgtatccctacctaccagtcagtgtgaaccatgtttaattaaaaattatgcacaaatggaaatctattccttcttgattgttaagtgctactactgctagcctccttgccaacctcagcatcaactaggagggagcattttctacttgtctcagattaaatattaaggggaaccccctcagggtgaagtatcctcaaaagagatgatgtcacctgttacagataattctctccaggtaatcacgagatactctttcagttcttgtcagcttacatattgtttcctccccagctgtgtcccaggaatgattagctacgatactgtggctagtatatgatatgatcatgagaagagtctggttttctgaacagaaccagatattttccatgaacaaagcagccagagagaaaataggtagatgacacatcttagcctagacttggaccacatccctgctataaggccagcccctcgctaaaagggttcacagatgagttgctaggttaaactgtttgaaaaatttacttttcccttgtatattaatgagtgacgctaaaaagcacagccagctaaaggtaaagccagatcagaaagaccaaaaagagcatgtgtcattcagggcttgcatctagatagtttgattaatatataaacataggaatttttttatatttttgtatattaatatctaaattaagataaaaatactctgagcacatatatccacccaagagcctttatctgatgatttttttctaaatataagtgaaatgctcccttccttttcttggttcaaattatgtgattcttccgcatggcttaacatattgtccttaaaactatgattcttttactgtaacaagtcataaacacttggcggagagtcatttttaagttcctttatgtggctaaaagaagagaggacttgagtacattaccctagcttacactgctctttatttgcattgtggagtcattgttttgatctgtcttctagcagtttatgaagagaatgtcactgtgtaccagagcacatttgtgatcttaccgacatagtcaaatatggaagtgaaactaactgtattcatatttatctcccataatttcagttactttccccagatcctcatttattagcttatagcttagcaggctcaatgtgttctaatacattccttcctttttctctcttgtatgtgatctatatcacctaaaaagagtggcttgcaaataaatgtcacctgcttgtggtcactcctagttctgcttagtgccatctccacagtgcgcacaagaatgcttgtctatagtcttgggtgtgtctgccattttaactaacttaggtctgtaagtgaaggcctctgaagagtaattaaatgtaacaacttaatagtcaggtgacacatcaactctattgtcaggccaattatctagacctctcttacataagtttgtcacccctttcactgtatccagcttttttgtctagacagcatgagtgagaatttaaagggtcaggggaaataattgatccattcagtgttctcaaagaaaagctttattttttttaaatggaaatattttattcaactaaactttctcaaacctctgcttctattgtccgaggcttttagagataatcagatgttgacagctgaattgataagtgttaagtttgataccatgattatctaatgtagaataacattagctagtttgtaagagttgctctccacagttgaagtcctcctctgacggttctccagatgctccgtgtggtccttacctgatactccctgaacttagccaacccatagcctccaagattttaaaatatattttccaagatagcataattccaaaatatataatgtattttccaaggtagtataaatcttctcaatgtatctgtgtttgaaagaactttttcacccctcttattctttattcaagaaaagatttatgtcatagaagagggaagctttaggctgggacaaccaagctgtcccaaaggtcctgcacaggtgcctgaccagttcctccaccttggcatctctgctccatctatttcaatgtctcccagtaactgcccccaagcatggaaggctaagagttgtcttatacgtgcatagcagcagtagaagcaagcagagcttctagaaagtaggtctaagttagagcatgtagtctaagaacacaaccagccatgacaacatcctacccagaaggatgaaggacagggctggaatgttgcctggtggagctgcaggcttcccacattttgttctaaagatttgaagttcactgtgtttctgatttaagaggtggaaaatgacaaaatggggagaattccaagctgcagcctaagtcggacccttttgtacagggcttaggtgacagtgtgtggacaagctatgacaggtagattcggaggtattcattagagtggcgcttaggcctcagaatatccatgtcaggcagctgggctacccagagttccacaggctgctgtgcatacatgaaaccacacactttggggtagagggcaagtcactgtccttctggaattccctcctttagagaaattgagtccacagcttgatagcctgcattcccaatacctgctgtggagctgaaagattcactccattggttccaagttgacttacatactcaggagtatcttgcacatactgagcagtatgcataaaccataacccaaagggagaagagaattaccctccaggcctttggcagccacaacaatagggatgggtaagaagaaaaggcagtagtgtaaatgtggttcaatggtgtctgaggagtcactgaagtaattaggggacggactctcacctctctaacagtgctttgtttgcatgactgcatagaagagaacagacttcttcttactgagaacctagaggaggtgccatacctcttactgtgcttagctgctgaatgacttccgatgacttcttttcatccttgagttctacagacttttccttacccagcctctatgaagagtctgttgctccttaaggcccagttcagtcttcttcagggatccaaacccagaacattaggagagccctctgctgctaagtcatggtggacttcttatcccacgccttgtcctttcagtctgagagaggaagttgtcccagcagcataagcacatacggtgtaactaggactccccacctcctctctcctaaggacagcaagtggtgacactaaagggactgctgacttggttcccctgtctttatcctccattgccatcaagactaacattattcagtacgttcttctcaggaccaaatctaaaaacaaaacaaaacaaaagcctttttaatcaaaatgaaagcaaagacaacattacatattccatgtcccgaattcgtgtgaaagttcatactccaatgaagcattgctttgacagagtactctaggagaatatcagtcaacagcagagtagagcagccagggtacaaggacggaattacatagtgggctacattcagctcccctaagctgctaccagaatccctgtttatagacagtgtcgttccagctcgctagaaaccatgacactgattcctccttacatgggctgtgagcagcctggagtgccctgctcatctgttctgaaccagctgggttatgtagtcccagttcttcacatcacccttgactgtagaaaagtcgtgtcgatggcactgactggggtgcagaaagaagacctagtctgctctgccacttcctcaccacccagcttaaatgtaaacggtttctctgctcccaagcctcctgaaccaagtcagtgcacagcagtggacatgtgtgttaggcctcagccactaaggtttggttgggtttgggtttcagttttcttttacatgcttccaagatctaagaagcagaggtatatatttccaaaagatcccggtggtacttgccagcagcacactgcatggagtggttctgtctgactgcagggcctcaccggcaaagggagggagagttatcattgcttaattcttttttctccacattattgtgattgatttctccatgtgtatcgtttctgtgtggctttgtttggttttgttctttctgttggtttaattgttgtgtgagctgcatgcacttgctgttgtactgtgtcaaatgattctctgacttcctttggaaagcactaatgaataagtgctatttctcttctctattgttgggttttttgtaaagttgctcaaatgctctcaggtatggcggctctgaatggaggacttggcgccacaggcttgacgaatggtacggctggcaccatggacgccctgacccaggcctactcaggaattcagcagtatgcggcagctgcactgcccactttgtacagccagagcttgctgcaacagcagagtgctgcaggcagccagaaggaaggtaggtagctatctgtaccccagggcctggcggggccagccagacttgcatttgcctttagaccatgcctgaaagatggtgatttgaaccagagtcttcagaggagtcacctgctgaatctctagtgtccatgttaaaagtctcaagcatgagccctttttaaaagttttctcttcatcttaatattttttcactcgtcccgaagttcttatctatcaggtgttgacaggaaattacgtactagttgctcccatcaaaaatgcctctaacatcctctcttcagtcagcaggagctctcagtctcctctcctcatagaaatccctcagtaagagggtaccattgatcaggctggggcagggtaagaatttctctcctgaatttcctaggttcttggggtccacatgccttgaagttggtacctgcctttcagaaagcaagagttctgactaatgatagaatccagttagaactgacttagactgtggggaagatgtcttctgggaaagaaggaaagtgatggctcacctggtggcagtcagcaacttgctgctctctttctgacttgttcagaagatggagaagagtcttgttattcttcccctttcaccttcacaccatagctacaaaatgcttctgcctagatatttatataaggagtctggtgatcagtacctgatatcatggtttattctgcaaagttaagatgtttaaggagatacaacttaaaagcatataaaatagaaaatattttcgacaaagagcatagagatcttcaaaaaagaaaaagtacatgagacctatattacttctcattgcttcaacctgccacccccttcctcttagctgtgacatcgtttgtaggttttgtgctcttttgtaggttttcaactatgcacagctatttggacaactgtgtttcactgggtgtttgaaagggaccctgtgttatgaaaaccacaaggccatctttgtttagtctctgtaggatctgagagccactgagaagtaagcaccataggaggtgacctgtaaagaacagagctaagacccctggatagttccggagagtgccacgtctccttgtcatccagcatggctttacaggacaatataactgtcactcagacatagctgcctcagcccactaccgtaagctggttgtctttgactaataaggacaggatgccatgattgccgagtcctaactctagtttagggatgttggttaacagtggtatgtgctagggctctttattgtggtactactgatagatattggtttgttcattttgttggtttggtttgctcctgccccatccctgtctcttacttctaacacctctctcttgatcatcttctcatccagttaatctagaaaagaatatcatccctctgccattagtttaagtaaaatgtaatttaaaatgcatattatagcaagggggagagcaggtctcctactcagcggatttttagattccctaatccacggctctgtccttatgctgacctttggtcaaagctgaaatgtatcctgaagggtttagtcatggactccggtgtattcttccaccacaggaaaagatgaggcgtttagacttgacaaattattgaagttaatgtctccataactagattttgtgaagggctgtaagcttcctacagaggtaaatgaggaaagcccatcacatctcatgccattgtgaatactctgtacccactcacgtacctaccccatctccctccctttacaggaggcaagttttacacccacaagtagttgcagcccccaggtacctggtaggaggcctgttggcactggtggtttggtgtagctttgttctagcagataggtgcctctgagcctaggggctgtgtgctacattgggtacctgtgagtgatacataatgcaacaacagcccgtagggatcagtaacataacacaactgccagtcacagtgtgctgggagaaggtagacagatagaaagggtgagttgtgaagagtttgtattgcttttagagatttggggtgggggggttgattttggtatctactactatgccagctgcatgcagtgatggttttctatatggagctacttctttttttctgttaaaagatcaaactacttcttggtaaggggacatcagaagagaggaatgaagaagatgttggaatttatatacaaacaaaataataaacaaaaggaccaaaacttctttttgtctgtctcactggtcatggtctccatctgtctggcacagacatactctggatgtttatagcattttggattgccaggatcattcaggaacacagtctgccctgtttattaaaagtgtacttactgctaagacttcgggagtagcaacactccttacagtgcactgggctccattactccttcttgcagcagttaaaccctttgtctggagaacacatctgagcagtatgcctagtctaaaagtacacggggtgcagtagcccctagcatacccatttgtagcactggagttttcaatctatccatactaggaccagaaaacagtgaaggctgtctcagctacaggtgtctccctttagaacaggctgcctccctggggctggactgtagacatatccatagaatctgtaagcgatatagtgatattgacatgttaatatcaataagaaataactgcatctctggtttcagtaaagtcttattctttaagactcttcattaattttctagggacaaaaatgtaccaattcatctatttttgcaaagttcatttaattctcattttatacaggtccacacacatagatatcattctccattgtaggagttctatagggagatcataggatcctggcccctgatctccacagagaacaggcatgttctctttcctgtgagagccagggacagaagtcactttcccagttctgtgagttcctttcttccagtgtccaagaaatatcccaactttatcttctctgtgtcaagtgcatcttcttttgtttctttcacacagctcttgtgtagatgagtcttgagttcagtgaggaacttaaggaaactaaccttctaagctgtagaactaaacagaccttttgccttctcccatggtttctggagtttgcatggaaaagggaacgctttgtttaacttagtcttggagaagctcttgtattcactgcacttactcccaatgagcattctcaggaagataaaggcccgtcaaacttgtaagcctatcttcccccccacctagctgttgactccctgccatttattctaacagagatgaatattatagtgtgtgtgcacagatttgccaaatcaaaactggctgaatagccgagtgactgaggatctgagcagtgttgctgctgttgcattcattattctaggctgctgcagtctgcttaggatgcagacaacactttcttgcacttcaggagatagtccacacacaaaacatggccacctcggagaaacccagtccagattctatccctgccctgcccctacctccacctttacccccatggagatgatgtgcagccaaggtgatccaaagattccctaggaaagagaagctacgtcagcatgccccacctccccacgcccaaggagaacatttcaaaggattagtgttttcctgaatatcatgccagtgctcaaacattatccatctgctcgttcttcataaggaaaagccaaatggctagcctacctattactgaagttattcctaagaggctttgggactaagacttgggggataccttactctgattttttcttcctctttaggtccagagggggcaaacctctttatttaccaccttccacaggagtttggagaccaggacattctgcagatgttcatgccctttggaaatgttatctctgctaaagtcttcattgacaaacagaccaatctgagcaagtgctttggtatgcaaaagaaacctagctaaatattgcaggtttcccagtcaggagtcaaaatagggccttccttatgatggtagctcctgacctagttgcatgtacacagatttgggcagaggtatttaatcagaaaaggggaaagagtcatacaaaaggtggcagtccctctccttaggtactattctacactgtagtagttaagcatcttcctgtgtccctgattgcctgtcaccatagagcagtagttgtttctttcagccctgagatggagtcaggaatgtttagtcggtgctacggacaagcactgctaactctgccacaaagtcttactcgtgcttttcaaatagctcgcacaccgagtcagtgcttgtgactcaggcttacaggcgtcacacgcatatgccactacatctctgtggactaggcactagcagttggaatatcccatgcttacagagaacaaagcattatgatgggcttagatcatacaattggccaggcagggctgcatgaataggcacaaacactcccagacacctagctgtctgcccttgtagcctttctgtctagagagaggaacttctttttctttttttttttaacacagtaatgaaaactcatgtcctgatgtttctgtaccagaacagaacttgttaaatccatgacatctttgtctgactgatttagcccccatagaagttaagaacccagggtattcagagccttgtttagcaagctctagctcagagagtgtcacagtattttgcaaatatcactcgtacaatttaatagttcacattgtgggaggcagtacattttattaaataatatatgggccaaaagatataggaatgtatgtactacaaagaaaaatatctaaagtagggtggttctcaaatagctggaaattcagactttatttggctgactgctagctaatgttttggttcatacagctctgctgctaggctcttccatcatccaggaaggtctatacctcagggattagaagaattaatgcagcacccatttctggaaagtcagcttttactctaggagaaaggctgtcagcctgacccactgcactgctgtggtaggactgttaagatccctctgtaacagctgaggagcaacatggaaaccaagcggtcacatggggtatatgcacgtgagagccacagctcgcctttggaaaggcttcctgtgcaggcctttagactgacatttttcatagctacataactgttctcagtttatttggaggctaaaagcgactataccacaaggtatttgtgatttgaggaaacattactttaaaaagagattttgtcagtctacttaaccaatatgttccaataatacacactgtggctgtgagaatcagggatgtattttcagtttgtcttaaaagctttgcctcccgggtttcttggtgagcgagtacagtcttagtgcccggggttagttacggagttgctacccatccttccgttcatgtcactcctgacccatcccattctccaatcatcttaccgcttctacccaagaccctgagagaaggagtcacaccagatgaaagtcttggatctgaggttacttttactgggaattagacttaagtaaaaatgtaaacaataatttttgcaattcagcctacctatgaaaagatttcctgcctttttatcagctgagaactctgctcaaagaaggtttatgccctttgccccctccactggtttgtaaaagaattttctctttagctttaaactgtaatggtagtagataggtgaagatgctaggatcttccaaattgctggtgtttggagtgaaactcaatctatgggatagctccctgtcgccactcaaaatcatgaaaagctcaccacttgcctcagcaatgctggtactcctgacttgcctcctactctgttaagacaaccgcaaccacaattctctcctcctgactctttgtaggatatcattcgtttttgttcaaaagcaggcatgccctgtctgtgtgatggcggcttagtgttgcagatacaaataactgggatatgcagagactccgactaagccctgagacaaagagaaaggcatgtggcctttccctccgtttgtctgaagagtaattccgaaacgttaagcagctagtatagattattctcactcagttaagtcagtggttgactcatcttgacgcagccagccctgtgtagactgtctaggagtatctatagtactcactctcttctgaggattttttccaaaggacccctggcgggagttggggtgtggtaaaacaaacaggtgtgacttcaaagcactgcatagagggacggagttcactagagagacttagctgtagttctgtggggaggcttctgtcctccatggaactagctctttcattacttcccagttggcatgcccactgctgtccatggtgcctgcatgggacagtataaacctagcaaagcccagctcagatcctaggccgggcacctctcagcattgcagtcacactgccggccagcagcaggccagccccgccagccctgttttccgcttggcttccccttcactctgacctccctacctccttcccctttgttttccaggttttgttagctatgacaatccagtctctgcacaagctgcaatccaggctatgaacggctttcagatcggcatgaaacgcttgaaggtgcagctgaaacgctccaaaaacgacagcaaaccttactgatcctaaccccagaagctccctgctcttattttagctttcttagggtaagtcccacaagccagcctgttctgaacagggaaggcagaggagggaccacgatgccaacttttaccaagagagacggttatttttacaataaggcctccatttcttccactcacaccccacccaatctgccataattaaaacctgggctaccttgtttttattgagtaaacccctcctccggttgtgccactgtattctctttgtttgcaatttgaatatccttactcttttaaaaaaaattgttttgcttttttaaagaaaaacatataaacaagtaaatgacatcttgagaatgtgaaaggcaagcaaacactaatgtgcagttctaactctgaaccactggtgccccgagagcactgcctggagaactcaccctcctgcccgcccgcccgcccgcccgcccgcccctcagagggccccacggttagagatgatgtggtggcccagcagagggagaagccaggagaagcacttaaaactccacaaaacaccctcccactacattggtttcttttaatataagtaggattttattttagggttcaaagaaacatgacatttattggtcagattattacactggttgtctattttgttattgttttatttttgtttttagaaaggattaatgtaaaaaaaaaagatttagagatctgtttcttaaagctacagggtttaaaaataaaataaaaatgagtgaaaatacttgatgtttcttgaaagataaatttaataataaataaatacataaataatacataaataaaaaagaaagccacaggcctgtaaattttatttgtaaaaaagcatttctatttttatacaaaatttttactgcctcagaaatactggaagctatttattgcctattgttaacttattgggtatctaagagcagttctctgtctagctggaaccttctgaagtagtctccagaggaattgttctaggaatgggcttttttcaccgttgaaccctagacctaaagttcatgcttttccctcttgtcgtttgtatttgtctgattattttgtttgtaatttccattatctagtttacgattcagttgtcttgacttccccatatgtcacctttgttcaaactggaccctctccgctgtcccttgctagtccttcaccccaaaacacccagaatccatcccctctcactctctccagatggattctcttggggtttcattgtgctgtggaaaaagagtgtaagaaatgcaaattatgtgaatggctcatagactccctgaagacccaagatttgcattagttttctcccgcacccttgaaagtgacgttgctgctgcgtagactctgtgtaacttctgactctcccttgttttctccccagacatcttcatgcccgttagtcatcgtttgcctagcatgtccctgtggcgtctcaaaaacagtttcatcgtcccgtcattgtttctgatgtctttctgacctcacatcatatttggttctcctactgacctttgatctagttttgacctttgaaatttgcatgtgacctcatctagctatgaattctgggaagtcaatgtgaaaaacattgctgcattcatgcaagactgaaattattagacaaattatagaaaacaaaacctgtggcaaaaatgtttctttcttatttttttttcttttcataaaacagacttgaaagtattacacagggattggcattctgcccggtcactggtgacaatagcaatatgtgtccagggacacagaatgttggtttctaacagactacttccaaaaacagtttgagaaaaaaaaaaaaactgtctgattttaagtctctagaggtctgtaatagtttttacatttttcaggcagtgtaaagttttttgataaggccattttaggtggctcactttctcattaagatatatatatagaaccactttttgtagattagtataagaaaaatatttaccctgttttggggcaaatgctacctatttgtgtcaccttttgctgaactgactcacagttagacaatccatggtttaatgcacatgaaattacctatattttatactgttccaatgtacaggagaaaggctactgtaagctgcgtcatgttggtgcttctgtggattaagttgtgctctcatcacaagtcttaaggtcttaatgttatttgttgataagacaagcttagaattggtttacttaaaacaaaaaaaaaaaagaatttcaaaaaaaaaagttgtttgcttaaaaaaaaaaagttcatgtgagagaaaaaagaaaaaaaaagaaaaaaaaaaaaactattccagactaagttttgtgttggcctgagaagcattggcgtcacttttttttattgtggactattagatgtgtttgtgttcagcaaaatgtgatgttttgttttttcttttaaagaaaaaagtgaaaactatctagtgccaaattccaaaggtacttcctccctagagcttcgcgtgtttcctgtgagaagtgatttgataacatggtattttattatgtgttttgtataaatccctaatatttaaaacaaacaaaaaaaaaaaaaaggttacaaagtttgttaacttgctattccgtggtcttgttgcctgaaattgttattgtttgttatttctctatgctgttttttgtaagacattgtataagtgccgtgtgtcacttttctaacctctccacgtcaatgctgtgacggcagccctcacaatgtattctcttcataatatctggaaacctctaaggtgagaaagtcctgaacttttaaccctttctacccagagctatctggaatgttggtgactttttatactgtcatccttgggtttgttttggggtgtttagatatttttttccatttgtatcttctgagttattttttgttttttgagtcacacaccttcccaaaaaacccttaagtctttttcctaaaccgttttttattttcttttttatcccctccttcctatcaccctgtgctccttcagtttaaatataagagactgagtagaccctgggaagggaaaaacaggtagagcttagccctacacaaaccctaaagaccgtgtctgctttttgataagggtttcatggtatgccctcgtgtacaatatttttatacaccctggagttaaatggctttttggtggtccaatctttcaagaagttttacttttgtttcttaaacacccctatgtaatgctgagtcagcctttggctcgggattctcagacgcatgtggacacctgaatatgcaaggtgtcttcctgaaaagcccacacatttcaagtggttggccatgtaagaggagatcagctgctcttcaccacaattactaccaaatactaggactagttcctgctgttgctctcgaaagtgccatattcctgagtctggcttcatatgagcagatgtcttgttctgacagaccccaatgtcatgcctacagtccaaacacacacccagcctctgggaaaacacaccctgcaagcttctggtctcagctcccttttccttcacaccctccctccatttgatttaatgtgtgtgtgaatgtgatagccctgagatggaaaggattagcctctcacaatgcaaaaaaaaaaaaaaaaaaaaaaagttccctccttccagcacgcgcacttccagtgacatgattggtgttagcccactgtttaccactgccggggccttccttcatccttgagggctattttgtactttctgcagcactcagctcactaacagtgatcacacacattctcagtctctctatggtggtgtgtaggtacacgtgtagaaacacaagagaataccagttgtatttcatagaccatctcgttcacaatctatttagttattaatgatataaatctcaaaaaaaaatcttgacttttttttttccccccatggaagccaactgccctccttcctcttaacccacctgcggcccccgcagaggctcgggtcaggcaggtactttctgttgagctcggtttctgattttgcaggcgaccaagaccgtccattgaggcgagggcttggttttgcatgtttcattgttagaaagttagccttcctcagagacagactgtccttcctctctcagtatcaaaaggaaacgctgcaagggtgcgcagggcctgtttccggaagacaaaacacagggaaactgcatttttaaaaatcaagtgtaaagcatatagacttttaaaactcactcagagaactctgatcagatggcacctccacggtgtgacaagttcatctttccttcaccgcaggggttctagttccttggcttgtgctactctggaatcatttactgtttctgtctttattatcttaagtgctaattaaaagaaaataaaacttaaaaaaatgtagtttcattaccttttgaataatgtcatacaaaaatgtatttgtgtttttgtgctgtgggaattgttgtttgtagattaataataccattttgtttagaactacaaaatagtttttaaatattgtctgagaaaagccaaagttaatgcaacctagtggaaactgtaagaccatttgagtattgtttctgttttattgatgcatttggattttgttgtttgatggaatttgagccaaaaaacaaaaatgcaggctttcctatttctacaactgattgtacttacgcattttgtaccagtgggattttttatactggagattaaaaaaaaatggaaatttttgtggcttactcttgtgggccccctgacaatgactgatttcaagtttgatttctggttgataggaagaaagttgcttttcctttaagaattaaaaactttggcttgatttctttttttccctttgcttatatctagcattagaattttgtcttaaaatacagcggtaagtttcactctttattctgtactgtgcagttacacaataagataattagatttagaagtactcagtcactttaagtggataaatgtattagttaaactttaggagtttgcttttttgctgtttagatcgaagttttttctgacccttctgtcctcattgtgaacataaccgtgtagttgaaacagtcagacttatttttgtaatgtatgttattgtgtgatgcggttttttgcttctgtctccaatattaaaccattttcctaata

SEQ ID NO: 374 - DNA, 5444 bp, Mus Musculus
ctgtggcattgatgtttgagcgcacttctgaactggcttttgttgagactatcagtgtagaaagcatgcgctgtcccaaatccgctgttactatgagaaatgaggagctgcttttaagtaacggcacagccaacaagatgaacggagctttggatcattcagaccagccagacccagatgccattaagatgtttgtcggacagatccctaggtcctggtcggaaaaggagctgaaagaactttttgagccttatggagctgtctaccagatcaacgtcctccgggaccggagtcagaaccctccccagagtaaaggttgttgtttcgtaacattttatacaagaaaagctgcacttgaggcccagaatgcactgcacaatattaaaactttacctgggatgcatcatcccattcagatgaaacctgcagatagtgaaaagtcaaacgctgtggaagacagaaaattgttcataggaatggtttccaagaaatgtaacgagaatgatatcagagtgatgttttctccattcggtcagatagaagaatgccggattctccggggacctgatgggctgagtcgaggctgtgcgtttgtcacattttctacaagggcaatggcacagaatgcaatcaaagccatgcatcagtctcagaccatggagggctgctcttcaccaatcgtggtgaagtttgctgacactcagaaggacaaagagcaaaggcgcctccagcagcagcttgcacagcagatgcaacagctcaacactgccacttgggggaacctaacaggactgggtggacttaccccgcagtacctggcgcttctgcagcaggccacctcctccagcaacctgggtgcattcagtggcattcagcaaatggctggcatgaatgctttacagttacagaatctggcaacactggctgctgctgcagctgctgctcaaacctcagccaccagcaccaatgcaaaccctctgtctagcacaagcagtgccctgggagccctcacaagccctgtggctgcttcaacccccaattccaccgctggtgcggccatgaattccttgacctctcttgggactctacaaggattggctggagccactgtcggattgaataatattaatgcactagcaggtatggcggctctgaatggaggacttggcgccacaggcttgacgaatggtacggctggcaccatggacgccctgacccaggcctactcaggaattcagcagtatgcggcagctgcactgcccactttgtacagccagagcttgctgcaacagcagagtgctgcaggcagccagaaggaaggtccagagggggcaaacctctttatttaccaccttccacaggagtttggagaccaggacattctgcagatgttcatgccctttggaaatgttatctctgctaaagtcttcattgacaaacagaccaatctgagcaagtgctttggttttgttagctatgacaatccagtctctgcacaagctgcaatccaggctatgaacggctttcagatcggcatgaaacgcttgaaggtgcagctgaaacgctccaaaaacgacagcaaaccttactgatcctaaccccagaagctccctgctcttattttagctttcttaggacatcttcatgcccgttagtcatcgtttgcctagcatgtccctgtggcgtctcaaaaacagtttcatcgtcccgtcattgtttctgatgtctttctgacctcacatcatatttggttctcctactgacctttgatctagttttgacctttgaaatttgcatgtgacctcatctagctatgaattctgggaagtcaatgtgaaaaacattgctgcattcatgcaagactgaaattattagacaaattatagaaaacaaaacctgtggcaaaaatgtttctttcttatttttttttcttttcataaaacagacttgaaagtattacacagggattggcattctgcccggtcactggtgacaatagcaatatgtgtccagggacacagaatgttggtttctaacagactacttccaaaaacagtttgagaaaaaaaaaaaaactgtctgattttaagtctctagaggtctgtaatagtttttacatttttcaggcagtgtaaagttttttgataaggccattttaggtggctcactttctcattaagatatatatatagaaccactttttgtagattagtataagaaaaatatttaccctgttttggggcaaatgctacctatttgtgtcaccttttgctgaactgactcacagttagacaatccatggtttaatgcacatgaaattacctatattttatactgttccaatgtacaggagaaaggctactgtaagctgcgtcatgttggtgcttctgtggattaagttgtgctctcatcacaagtcttaaggtcttaatgttatttgttgataagacaagcttagaattggtttacttaaaacaaaaaaaaaaaagaatttcaaaaaaaaaagttgtttgcttaaaaaaaaaaagttcatgtgagagaaaaaagaaaaaaaaagaaaaaaaaaaaaactattccagactaagttttgtgttggcctgagaagcattggcgtcacttttttttattgtggactattagatgtgtttgtgttcagcaaaatgtgatgttttgttttttcttttaaagaaaaaagtgaaaactatctagtgccaaattccaaaggtacttcctccctagagcttcgcgtgtttcctgtgagaagtgatttgataacatggtattttattatgtgttttgtataaatccctaatatttaaaacaaacaaaaaaaaaaaaaaggttacaaagtttgttaacttgctattccgtggtcttgttgcctgaaattgttattgtttgttatttctctatgctgttttttgtaagacattgtataagtgccgtgtgtcacttttctaacctctccacgtcaatgctgtgacggcagccctcacaatgtattctcttcataatatctggaaacctctaaggtgagaaagtcctgaacttttaaccctttctacccagagctatctggaatgttggtgactttttatactgtcatccttgggtttgttttggggtgtttagatatttttttccatttgtatcttctgagttattttttgttttttgagtcacacaccttcccaaaaaacccttaagtctttttcctaaaccgttttttattttcttttttatcccctccttcctatcaccctgtgctccttcagtttaaatataagagactgagtagaccctgggaagggaaaaacaggtagagcttagccctacacaaaccctaaagaccgtgtctgctttttgataagggtttcatggtatgccctcgtgtacaatatttttatacaccctggagttaaatggctttttggtggtccaatctttcaagaagttttacttttgtttcttaaacacccctatgtaatgctgagtcagcctttggctcgggattctcagacgcatgtggacacctgaatatgcaaggtgtcttcctgaaaagcccacacatttcaagtggttggccatgtaagaggagatcagctgctcttcaccacaattactaccaaatactaggactagttcctgctgttgctctcgaaagtgccatattcctgagtctggcttcatatgagcagatgtcttgttctgacagaccccaatgtcatgcctacagtccaaacacacacccagcctctgggaaaacacaccctgcaagcttctggtctcagctcccttttccttcacaccctccctccatttgatttaatgtgtgtgtgaatgtgatagccctgagatggaaaggattagcctctcacaatgcaaaaaaaaaaaaaaaaaaaaaaagttccctccttccagcacgcgcacttccagtgacatgattggtgttagcccactgtttaccactgccggggccttccttcatccttgagggctattttgtactttctgcagcactcagctcactaacagtgatcacacacattctcagtctctctatggtggtgtgtaggtacacgtgtagaaacacaagagaataccagttgtatttcatagaccatctcgttcacaatctatttagttattaatgatataaatctcaaaaaaaaatcttgacttttttttttccccccatggaagccaactgccctccttcctcttaacccacctgcggcccccgcagaggctcgggtcaggcaggtactttctgttgagctcggtttctgattttgcaggcgaccaagaccgtccattgaggcgagggcttggttttgcatgtttcattgttagaaagttagccttcctcagagacagactgtccttcctctctcagtatcaaaaggaaacgctgcaagggtgcgcagggcctgtttccggaagacaaaacacagggaaactgcatttttaaaaatcaagtgtaaagcatatagacttttaaaactcactcagagaactctgatcagatggcacctccacggtgtgacaagttcatctttccttcaccgcaggggttctagttccttggcttgtgctactctggaatcatttactgtttctgtctttattatcttaagtgctaattaaaagaaaataaaacttaaaaaaatgtagtttcattaccttttgaataatgtcatacaaaaatgtatttgtgtttttgtgctgtgggaattgttgtttgtagattaataataccattttgtttagaactacaaaatagtttttaaatattgtctgagaaaagccaaagttaatgcaacctagtggaaactgtaagaccatttgagtattgtttctgttttattgatgcatttggattttgttgtttgatggaatttgagccaaaaaacaaaaatgcaggctttcctatttctacaactgattgtacttacgcattttgtaccagtgggattttttatactggagattaaaaaaaaatggaaatttttgtggcttactcttgtgggccccctgacaatgactgatttcaagtttgatttctggttgataggaagaaagttgcttttcctttaagaattaaaaactttggcttgatttctttttttccctttgcttatatctagcattagaattttgtcttaaaatacagcggtaagtttcactctttattctgtactgtgcagttacacaataagataattagatttagaagtactcagtcactttaagtggataaatgtattagttaaactttaggagtttgcttttttgctgtttagatcgaagttttttctgacccttctgtcctcattgtgaacataaccgtgtagttgaaacagtcagacttatttttgtaatgtatgttattgtgtgatgcggttttttgcttctgtctccaatattaaaccattttcctaata

SEQ ID NO: 375 - protein, 526 aa, Mus Musculus
MFERTSELAFVETISVESMRCPKSAVTMRNEELLLSNGTANKMNGALDHSDQPDPDAIKMFVGQIPRSWSEKELKELFEPYGAVYQINVLRDRSQNPPQSKGCCFVTFYTRKAALEAQNALHNIKTLPGMHHPIQMKPADSEKSNAVEDRKLFIGMVSKKCNENDIRVMFSPFGQIEECRILRGPDGLSRGCAFVTFSTRAMAQNAIKAMHQSQTMEGCSSPIVVKFADTQKDKEQRRLQQQLAQQMQQLNTATWGNLTGLGGLTPQYLALLQQATSSSNLGAFSGIQQMAGMNALQLQNLATLAAAAAAAQTSATSTNANPLSSTSSALGALTSPVAASTPNSTAGAAMNSLTSLGTLQGLAGATVGLNNINALAGMAALNGGLGATGLTNGTAGTMDALTQAYSGIQQYAAAALPTLYSQSLLQQQSAAGSQKEGPEGANLFIYHLPQEFGDQDILQMFMPFGNVISAKVFIDKQTNLSKCFGFVSYDNPVSAQAAIQAMNGFQIGMKRLKVQLKRSKNDSKPY

SEQ ID NO: 376 - DNA, 330354 bp, Homo Sapiens
  misc_feature (1)...(330354): n = A,T,C or G
cgactgtggcattgatgtttgagcatacttctgaactggcttttgttgagactatcagtatagaagcatgcgctgtcccaaatccgctgttactatgagaaatgaagagctgcttttaaggtatgttgttgtgtcctttgtttttaatgcacgcttttctagtttctagagctggctgagacaataattatgctctgaatcaagtagcttccttaccttagaagagaaggggggaaaaagaatctaaagaggaagagggagatgaaatcgagacccagagattgggagaaagagagagccagcgagagaaaggcggaggactgccgtgaattctatttgtactagttgccttttgaaagcatatcatgtatttgctcactgctatttgtgagtggccagtggataattttaagggctctgaatctggatcttggttcgtcttttcctttgcaatgtctaagcctctttcatttttatgcactctgcatggaataatcaccgaaaaaggagctgaggagactccatattagacttgcgttccaaataccgctctaatctggacttagcctacctaaatagtcctcctgtgttaccaggtttggatcactttatcctgtttgccaaaatgtgtacccgtttggagacctctttcatgcatggcgtcctgggtccccatgtattgaaagcaaatatttgtttcctgcctctgtgttgggggttctctcacataccaggaaggaggcaccactgaccttttgggaagcagagggaaaattatgatagaattggcatcctgctttgaaaaatgtagtcttttgtttatttgctagcagacattgtagcactgaatacatctttgggtctgacaatgggaccggttgaacaatgcagctgtcaaactagcttaatgcatgtctggggctttatttttttctttttcaacacccttttttatctcctataatcttgtttgtatagactatcagaatgaagagcttttgcaactgcttgtttgtggtttagtgcttttaaaaaatttagtatctaccgttcatagagctttttgcattctgccgctatgttggttggattaagttagagatttatttcttacctctctgttaactactgaaagaaaacttattgattgagaatgcttgtaataccattatcattctggcaaatgccttgtgatcagacctgcctctatggtatttaaagcttggggatttttaatttgctcatttggtgaacttatgaaacatagcatgaaaaagagttaagaggaatattcttgatgtttacgtaaattacagtttttagtctctgcttctccctttggcatccatgtagataaacggtttagaaattcaaggacaagtgagaacttttgccctcacaatttcggtcacaaactattattatatagcctattaagttgtgaagttcaaggtctctgtggaatatattgatttttgatttatgcttatgtccttataaaatgcctttctatgcagggcaaacatttctcacatcttcaaatatctttcattttacaagataagcgttggtttctaaggtgagaacagtgaagctttcgacagagaaaatggaaaaatctgtttcaaacttctcaaataatgaaaccattcatattgccacataagaaataaaagaattggccctagactagtgaattataattgatttacatgaaaatcattttactaaggttgacttctgtgaagaatatatcttatctaacattctaatgtgttgcttaattagctgtttgtgccacagcaatatatcagaatatattagtacatttatagagagagtttaagtacctcattttaaaaaacagaggggaaattgttttgaagggtaatttttcaaactttagttgtaaatattccctattggattatattttggtttaaattaatgatgttctcaataaataagaaacaagatgtattacttaggaaaacagttatgaaacatgagctattttttagaatttggacgtgaatttcagtttttttcaatttaagttgaaatgttacaaaaaattttaatacaggattattaaaataaatgttaccggataaatagaattgccttctaaagtagagatttttctatggacagtattttcagagtaggtacactcaaaacatatgtgcagcataatcatattttttaagttatcggttgtgaatagagtgaattttaaatgcatgcctgtgatgttgtcttacttgcgatgggatcggaactgctcattccatcgtataccaataactgctttcaagatgggctcataaaaggtaattggtgaagctttatatctgaggccggcacacggtttccagcacactccgattctgcttccatgggaaatgtttaatccaaaacaaaggttgcaagtcaattttgtgtgggttgggaggaaagtagccttctgtgctccctagctgcttgtccgtggcccgcttaaagaaacgacgtggaaacccccacgttgaatttttgactaaattagcagttatttatctgtgatctagtcactctaattcctgggtagtcacagttaggtacggaaacgaggtaactctcttctcactttgtttgcttttccggtggttggattattaccagctcccggaatttggaagctgcccccattctagcatccgacatacatatgtcttttcctttcacctgatagggacggtgtgaggttgcccgaagctggcaaacttgtctacatctatttccacaacaggaacaggatacgtaatctgtatccttccataagcctctatatgtaatgattcctcaaggtagtgactttaacaaatgttggaggaaagtttaattctaagcccagacatgcagaaaaatgaatagcaaaagattcaaactgggaaaatgacttctttccacagaaagtaaatattgcaccctaagcccttctgccatgagctttgggaatattcacatagatgtgttcagcagaccacagactgagatctctaaccccctgtgtatgaatattccttgatttgttaaaatgaaaccagacagttttgctttttttaaaataggagggtatacatttgcaaaaatctccttttggggctgaaaaacgaaagtgagcatttgattagtattcatatctagaactttgtagcaagtgcagattgtgctagaagaccgaggaagtcattcaaagagtgaatcaatactaattattgtaatcaggggggttaattaggtgaaaatgtggctgataaaaagttcattgagcacagccatggaaacacgcaggttcttggaaagaaagtaaaatgcacaaggaagagtgttacgtggggacgatcattctgtatttaaggtgtcagaattcatagacgaaaagcataccttggttttgtcatcatggtagtgagcatattagaaatatcccacttagatttctttgtatggagatttctgtaacagtcattaacagaatgcagtttgttttgtggcatcatcttctttgtggcattgatctgtactttctggaacagtaatgagcacaagtccattcagtggcaataatgccttcttgggtcacctttattagccttcactgaatttctttgcatattttgataattcctggggaatttgcggggggggggagcattcctgattcataaaactattgattgcttctctaattgttcctggatatgggattctttttctgaactaacagtgacttttgttgggtaggaaagacaaggcagtggtgtggagaggattaaaattcgtggcaattgacttggctgacattggaaagagagtgtccaaggagggacaggacgtgggaggttttaatgttgtagcccattcagaattaaaatgaagtgtcctagagccgaagcacctttctgattaaatggcatcaattcacagagatcggactaagatggaagttgtgtgtgtgtgtgtgtgtgcgcgtgtgtgtgagtgtgtgtgtgtgcgtgcgcgcgtcggaacctccgttcaactcagagatgttgctggttaaccctgattttcgatgaggtacactttgttcccaaacacaccattctgcttcatggaacgttgtcagcaattatcaggtacaggtgtgtttatctccccccacagctttcttctgagtgtgtgactgatccggcacattttcttgtatgtcaagaccatcaaagttaacaggaaatggcatctgtggagagagggtgacaccagccctgagtgacatgtattacgagggcagattgaactcctgctacttcagcccattccaggttgacccgcccatgattggctgtttaggatggtgatgaatcacttgagtttagggagcaggattggcagcatgccctcagagaaaaataaaaactagaatttccctgcaagactatttagttccacaaactttgttgtcatggaaaggaagagcttgaggtttcaagttatgatgctgacatacctccgatatgcgtggctgttttcatccccttcttcagaaggcctgcagctgcaatcagtagaaaactctgtgttgaagcttacaggcagcatcacgggcttctagcaggtctgtgaactgactagcctgggcacagttgtgcctttatgcggaaattgatgagttgcttttcatccttcttgtaaggctctccatctcagtcccaccaggacagcaggccctgcgatgttgctcatgctttgctttgtgaacatcctgggctgagagtccagctctcctctgggctcgatgagaaggctgacctgctcatttggagatgcctttaaggtatcatgtctgtaaatgaaaactcatgttgaccttgtttatgaaaaacgatttgataaaaacgaatggagaccccattccaagcctcaggatgttcggtgcctgctctccagaaacgataacctccctcttccctctgggtctggctacaggccttagaagtatcagtggaaacctcagtgctaaaagaacaatcgaatcagtactggccttctctcttcctttccaactgcccgttgtaggttttaacaaagataggggtgggggtgttgaaataaggaataaaaatgaaacttattaacaatctacctggcactacactaactggttactttgatcttgtataatttaatcctcagatatccaagagttaatggtagttgttattcccattttaaagatgaaaaactgagcccgagagaggtaaagtcacaggcccatagacacagtgggaggaactatgaccctgtattcagccaaacacctcccatgagccatcttgacagtataactatttaatagttgacattttaaagacatttctttctctggtgctgtggttccactgtagacgttgatttgtgtctcctggctttaactagcgaggaagttgtacaattcagcgaggaactgtcacgtaggatctgcggtcaaatccctggtcactgtttatagtttcagctgctcagcccttcctaaattacagctcttttaaacttaccttgcagtgccaattttgggaagggcataggactgaagaaatggagcacagtgctaatgcagaaagcatctaggaaggaagaaaggaaacatttttgaaagtaccaatgtagattctaacaactctctcttctgtaccctcatttgttcaccttacagctgaggaggtctttgaattaaagcatcccatgcctcacttctcttgggcttgaatctgtataatgggaacagatgttggaaggaacaatagacaattttaaagcattatgaaattaaagtatgaatttttatgcatctcgggggccaaaataggtcatacggcaatgaaaaccaagcaagtaacaaacatacatgcagtgctcaatgaaagacatagtctggggcctcaagcaactcacagcactcatggaacaaagagtagacagtgaatgaggaggggtcaagtggcgagatgcagagacaggggagttgagctgggccctgaaggatgggcagatggaggtgggtgagggggagagggaaggtgtcattaggacaccctgaattcatctttattattaaaaaaaaaaaaaacgcaaaatacaatccttagcttcatctcctttcttcctcagaccctaatgtcatttacatctctcctcttctcttacctgccctattcctatgaaacagggcaaatatgtagctattcatataaagaggaaattgagaagtgaagtgattaggtcacatgacactttgtactcagcgatagtggtaggacaagatagaacatactccactctgtatagcttgactaggtagctataccactttttcctaaaggctttgggtagttcttttaagagaaagaaaaaaaatttcccctaatggacttcatgggaattagcatcaaaagcaaagttaaataaaaagtcatttgggattttcaaaagcctctatccttggctaaaaatggctggagatttgaaccatattatagggaaaaaataaatttcctgtgctcaaaaccttaatgtattttcaacctacatgtcactttaatagcttggttatataactgctgtagtgataattaggttaacacattgtacttcttatctgaggatcatggtaggctttgatttttcagccattcatctctattaggaagtacggaatggccacgcttaagaagaaaggtctagctgatgaatcagaaaattaaatgactcattcccattgtcaatcaactctttgacagaatgaaatgctgaatccaacaagtctggttcttaagcctcaaaatgtcttcactcagtctgaaagcagtgcttgccctaaagattctgatctgcatgtactggatcagatatcttctgatcctagtgaccacgagctctttgggagggatcagttaccatagtgagtcaagtagattcatttgctttattttaacagaaaccaaagctttggctctcttaatcctcactcttttttcaagatgtatttgttcagaaaaaggacagacattcaggcacatgggctgtcatgcccagagagattccctctgaagtagagaatttgattcctgccaagatccgtctcagacaaccccaccctcaagcttaccacatccatttctcttcctttcaccccacctgttgctgccttctccgggaccgaatgttacgcctgcaactgtgtcctcccagctgttgctgttcagctgttgtagtctgtcaagcggtaatgtctcctttttctaaaatttaacaccatgtgacagtaagacaagaacttctgaccagttggggaaaacatgtcgtcggggtgggggcagtgaggggtggactgggaaggaatgaaaacctcattctgataagtgtaaattttgttcctgccgccaggctggcaccagataagggcacttggtatggtttgacaaatctcggcatcttcaagagggcactgggacatttcttcaaaggatttttttttttctgagtgcctgccgtgtgcaaatcacagtgctaaacagggaagcctttttcttctccccaccccttccccagacgtctccttcccagttttcacatcctattgactcccttcatagtggacagtcttccatcctccccctcctcttcctggtaatgtctggaaaggaatcccagggctcactgcgaagacagctgttcctagttcagaaatcggccttggtcaaggcaagtcaaacatgatttctctggcagatgagcaacccacggctcctttcttcactttggtagccacctacttcctcagacacgcagctggagaggaagtttctgccactgtctggctcccatttgagagagaggaggagaaaagggagaaagagaaagctgagaaagaaagaaataaaaaggcctgcaatcttggtacaatggagaaaggagaaaaaggaaagggcaagttagagagggaagtgatgagatggttgggctctgggtgtgagagatccacagtgctaacatttcattcccttggattggaagctgcagaccacgctagtggggtccctcctttgcgagtgagaaggtatgtatccaaggaactgtcttcagcttgaaggcctcttcacaagggagataaattcatcatgatgtattctggctctatgaaaaacagcttcagaaaaacacaagattgcaaaaaataaaaataaatagaaaccagtggaagctattctcaagcaacggtgactacttactattccctgaaaaaatgtaaaatgagcttaataacgatttcatctttattggcatttacttttacttaaatcgccttagaaatgtgataatgtcactgttccagaagttatcaagatggagggaaaataagtgatcattttaaacttataattggcgatataaatatttattgtttaagtgatgtcattacggaaccaagaagagataggcttacaatgtgtcacttaaggatatgtttggggttttttgttaacacattaaaaaatgtttatttttgcaagttgctaatgaaactgcagtaagccaagaacaaacacatggtcacaaagtcagatattctctcaggtacttaaaattcatgtggatttcaaatgtattgcctggcaatgatgggaaatcccctcacagggcctgtattgcttgctccaaatggctgtgagcacgctggacgtgtttttttgtttctttgctgttgctgttaactaaaacagctatgctaataaaatttgaatttgcaaatgtgataggggaaagatgttttgcatcctggtttgtcatgacgagccagaaatgagaaggaaaaagaaatccttcagtaaaggtggctttttgagttgactgaacaatgctagcacatctttgttctgtagttgaagggctgatagctactgccttttaagtgatgctaccatgggaagttatgtataggaataataaaaaatggaaatgtcacaagatatacaaggttgtctgcacgagcagaaaattaactgttgggttataaacatgggtcacgatatatcaagcaccagtccctaaattatagtagcaactttgtgcaaaaatgttgaaagatctcaagtcagtggactgtattctggttcactgattgagtgaggtggcaggaaaagggtttgtattccaattcaagcagtttgtactctgcgtacaaatgcatttattagcactgtttccattgagtgtgttttttttttaatgccagtgataattcagtgctcaatgacctgtggacaaaactctgtatgagatgaggttcgaagacggaagtggagctgaaactgcacagtgctttcccttgcctgggaaggcctcatataaaatgaggtcattcagaaactttcccttgaagtgcttccaattcttgaattgccttttgtttgggaaatgaatagcaagttgattaaaaaaaggagacaattagggaaggtagggggatggggctaagaagagcttaaggtttttccacaatgcagctaaaactatgaggaaacttcattgttcaggacagcctggtccccagtgatggcaacacagggtggtgtcaccaaccggttcatatccacgggtggggccagctgatggcgtcgtcccctccactgctgtcgataagatccttgactataaaatagcttcattgaacccgagcgttcaacagcggccccatagagctgtctgccaaataactccaactgccaaaacatgatacctgatggctcgttactgcatgaaaattaaaaaaggggccctgttgagttgtttttagattttttttcttctttccaaagcagtgaaatgagaaattgaagcttttcatcgggtggtatttggttgggtgttcttgttttgttttctcaagagcttttgaaatttgtatttttacaaatggcttttgtgtatgtgctgtgatcatggaaaccgactcgatattagaaatgaaagctacaaatggaagattgttgtcaataacctatggtggggggtgatgtgtgtgagtatttagtttccctctggtatctacatcaagtgcctatgcaatcactacattatttatttggcagccaaagtatttaaagtcagatgcaccccataagctctcctcggttcacatcaccatatcccatgtagagtgagttttcttttatatttgaccctggttttgcttatatctttaaactgcaaaagcaaatgtgatttgaaaactatgttacacagtagttaaataaagcagtaacctatgcacttggaatcctctctctatgacctacttacatactacttcaccctcctcatagtatgattaaaagctgctttgaatccactattgcctcaagggatttgaggctagaatttaacaaactgctgagaaggcttaagtcagtaagagggcttccttacagcttcttccaactaattcacatgcaattaaagagaaaataagtatttcagaagcgtacatgttaatgaaacatgttctaccttatagaatgtagatatacatgttctaccttacagaatgtagcctttatgctatggctgattagaaaatatttttcattttgattaatgcagttgtgttttgcttctgttttggaggccaagtctgctcctttcttaaaataatttttatatagtcagctgattatatacattagatatttatgcaaataacgtatggaaaaccaagaactgccaaggtttgtcttcatttatccagctaattattaagataattgaagaccaatcaaaatcctgtaatttcaaaggcagaagagtagctggggaataaatgcagcttagtagtctggggacaagtttggccctttgggagtataagaattcactcgattgcaaccattcctcagttccttaggagcccagacctggttcctccagtaaggtagtatttaaaaaattaaggttagtttagccctacatctaatgatcttggaaatagaaggtcaaaagccagatacattgttcagctgaagaaggcaaccaagtccattaagcatgtgtggacttaattgaatatcccaggtctgatactttgtattgctcaatgcatcaaactggatttaaaattgatatgtaagtgtccatttgccttcataacctctaaagatagttagctgtcatcacacaagaatctggtgagaaataattaaaatcatattttgtctatatcatgtctgatacatttaactatttgtaacttggttgtttaaccctctggtttgtgtgatggtatcctcaggcataatttgtgaggagaaagcccagcttcctagcacagttctgatttttagaaagacaaagactgaaaattacatatttcaaacaaaaccatgtgtgtgtgcgtgtatgtttgtataggtatatggatgtatagctgtatagacacatacattaccctaaaagtttaagatgtcattacaaaatcaagtgaaggtttctctaagaggtaaactataaacttttggtacgcaatttatgatgttgattcagaatgtgaaatatgccatgaagtcttacatacttgtgactacactgtgaaaagtttgccacccacataatcaacagtgagaacgatcaattagaatgtcaccttagaaacgaattagttttccagaacttatgcaaatcacttaaaaattaaactcgccagcttctctgttttttctgagtttggccatttttctcaattcttgttagtaaatcagtcacaaatcttaagtggatatttaagcttcatggcccttacattacagacctaacactcgtgaattcactcagctggtttctaattattgtgttaaatactaggaaatggcagattcatgattatcgtttgtgtagaaaacgtgatttatgactttattttcagccgcttatacttcttagtgtttgcaagatgacagaaaaggcagtgccatcgtgcagagacaggtttgtcttccttagggcactgcgataagtccctaaatgtcacttgggtcatagatctgatctttattttgcctaaacctcctatatcctttcggtgatcgcccttagttcctgcccgggcaagcacaccacaccgaggagcatcgaagcgaaccctcgggctgctcgcctcccgcggctgggctctgggagcgcggctcgggtctggaagtggagcgggctttggcgcctgggtggccctaaacctactccgagcggccacggcggcctcttgccagggacccccgggcgggggagcagagccaggcggggagcgggtttgccttcgggggcccaggggaccctgagaagtctggccgtgcccgggcggtgagcgcggaggcggcccgccctgtgtccccgcggggcggagccgggttcggggccgcgctctgggccggcgggcccgcaggggttaagcggcggcgggcgccccgcgagctccgcccccgcccgccgcacctggcgctcggcagccggccgccccggcgctggatttcggaggggattggcggagcgcgaggagagaatgtgacaagtgccggctcggcggccgccgggggaggccgcgcgcacctgtccctgcccgtctcgcgccgcccgcggccgctcggacgcgcgcagagccgccccccgccgctgccgccgcgtgcgcccgcgaacatgacttctgccttcaagctggatttcctcccggacatgatggtcgagggccgcctgctcgttcctgacagaatgtgagtggcgccgcgtcccgaggccgggcgagcgggcgtcctcctcccagagtcggcggcgcgaaggggacgggcgtcgcccgcagctcccgggcgcgactcggccgcttcggatccgtcgcctccctcggccttcggaggccggcacgggacgcgggaggagggagcgggtgcggacgagcagcgccggcggtgcagggcgcggggcttcccggagggacgagcggagcgcggcgtcccggggaccgggcggggtccgcgagtccgggtgaggaccagcgggccgagcgcggcgtcccgggtccccgcggggtgagtgggggacgggcggggtccaccgaccggcgcgaggacccgcgagcagggtgagcggggcgcggcgtcccggggtccgggcggggtccatgagtccaagtgggaccggcgagccgggcgcggagtcccggggtccggtggggcgggcggggaccgggcggggtctgggggtccgggtgaggactgagcggagcgcggcgtgacggggaccgggcggggaccggcgagcgggcacggggtccgggcggggtgcgcgcgtgcgagtgtgcacgcttgtgtcatttgaaatgcggggctgacggagctctggtggccggggggaaagagctcttcttaccaaattacccgctcatctgatttaatatttgcaaagatcctttcctaaggtgggagaggggaagcggagacaaggaagggcggggggataattataaagcgtgaaactagccaggtgtactttattgcagaaattagaggtaatttttacgtaatcatggtttgtctgatatgcagtctgtaatttaataattaatgtgattctggttgttttacatgtcgtcaaactaaggtagagcgtttattggaaagaagtagagagctgggattcctgaagaaaggaaagtatgtctaatttttagctggcttgataggaaagtttttattagctcggaggggtcagtaggatctatttgtatttcaggcatgttaggaaaaggaaacctaaaaagagagaaaagattgccagagtgggaacaaaaggtctgtgtcctttttcgacattttaagttttctctgatcaggcgagaaattggatagcggatctaagctgtaattaatctaatccagtgagaaaaaaatggattggtatggtaagagtgcgtgtaaaatgtttcctgttctacccactgtaggacttaacatccctattctgtctggcaccttatggtactctgcagtattgaggttattccaggctttatgatccatttccctggcaactaactttcccctgccatgctagattctttttctagcatgttaagtgttatgagttaagagattcttgagaaactctgcagtggccaattatttgagctgcaaggacctccccaccaaaaaaaaggaggggggtggaggagggggatgatagaatctgttatgcaaattgtcttttgagtcaatattaagaatgttaatttgcttgtacacgatcaggttcatcttttccgtattctgttttggtagttttctccgagatgtgaatcatgattagtaacatttccacgatatttgttttaagagacctctgtcctgtcccccatcttaaaatatatacctgtatagacacgtaatacatgtttgcacatgagctagtatgaaagttttatgcgttttctcctctagaggctagagggtccaggctaaactgaagaattcgcctaatcatgattttgaatttatggtcacctgctacttaagtgaccataatatagctaagctgatgaatgctctatgaatttaaagtgttaatggcctcagaaagatgcagtttcttgtcaattaaattatgaattacaaaaatttaatttatccttttcatttggtggatgaatgtggcctgttcaagcgatttgctctgaactgagcccttgtgccttagccatggagtctcctatgaaaatcctaacgtgacttccacctcacttctcttccaaatgttagttatttccaaatgatagcctttggaatcaaacccaaattgttctcagcgtttgtcagctgttgcttaattgaactaagggaagaaaagaggatttgtaaatgatagttttattatttgtttcctaaatagctattgtgtgtctccatagccctgagaacactagagcatgcttttatatatcgttcataattaactcacattaaatactgtatctggggatagaggtgtgtgggggggaatatgacaagttgaaaatgcctgaaatccgcctaagttgtaagttttattgccatattcacccagttgagaagatagccatgcggatttattgttttagggactggttgtcatgtgtggtatattgccatttggactaaattgcagtcggctagatattggcctgttcctaaaaggaacttaaataaagcataggggcttttctgctgttgatttttctaaagcagtagaatattttcaatggcgttttcccacgagaatatattagataagtttgcaagatgtaatatgtttgagtcctcaaggcagatgaacaaatagcttttgagatgaattattacgcttgatagccccacgagctatccagtgtttaaagagcccagatcatttaaggctctgtagtggtgtagaattgctgtaacatatgcttcaaagttttggggttttaaacattcggtatcaaaactataaatggaaatggacattttaaataatcttggctattaaagtttcattgtctttgtgttactatacaatatcatctacaatattagccacacagcataatgaaaacaggcactgatttttttttaaatttgattttaaactgacagttgattttcaattaagatggcggagagtgtttcctcctttgattcacctttttaatgaccatatacatgcatttagggtttgtaaatggttttggatttttaaacaaagctaataaataaagtctcagaaatgagaaattacagttagactgataaacacagcttaaaaagcattaggtgttagaataagacactgagaagagtctaccaataaattaaaaataaattttttttacatttggtaggtaaccttattgaaaatgagaaaagttatgttgactgtaaattcatcagcttaatgaactagctttttgttaagtcctttcaagttaggataactggcaaaatatctatcagtgtataattaaactgaagggtggttctaaggacatcattgttaaagctgaaaagggctttagagaccatctcatcagacctcattttatagattaagaaactgttagaggggcagtgtgacgagtccaagaagtaattactgcctccccccaaaataaggaaacgtgagttgttagttgagtgcctgccatgcgccaggatagtttattcacaccgtctctaatctgcagggtggatattgcccacattttacagatgatgcttaaagaggtgacctgcttgcccctgccacataggcagtaaatggcaaaactgtggttttcaagtaagtgaacacatgtggggtggcatgtaatgttcatgggttgatgcagagaagaacactgaattaaaggatatgacatacccttttatcaaaatcaaaactgtgccatgtgagaatgagcataagaaataagtatgtcacctgatcaggattgatgtatgtgaaacatcattttatactttctaatttgattccaattcggttattccatatatttattaactaagcagaatacgttttaattaaaaatctttttggtttacaaggttccagcaagataaagatcaaaagcagtggggttctgtttttctcctccatgggcatttaaagtctatttagaaaatgcagttataaataatacggagataactggcatttatcacctgatactctgatggtcatgaaaggaaattaaaatgagaaaagtctaaagaaaagactttgcgtatggttctttaaggaaaatttttgaagtgtttttttcagttgagattgctccgttaacagcacatgttatcagctgctttccgagaggaagaattcgtcccacattggctttttagaacactgatgttatctttgatctgggcagaggtattattttaattgtttaatcttgctgtttaattgcaatttgctgggttgagataactttggcatctgttgatgagatgcagtgagctggggaaacaagacccttgaaagacaagataaaaaggtgatgggatttttggatatgaacctagtaattaagatttcatgggatcatttggagtgttttccacttctcagtgtttggttgttttttttttctcccctgacagctacaataacactgtatttggcctctggtaaaagactgcaatatccttagcttttttacataaatccccaaacttcatttctctttaccccttccttacttttattaaaagttaaacactcgtttacttagcataaaaagacaggttacgtttggcatgcaaaatgatctgatacagctgagtgtaatacagccagcgcccaatatgacccagctcttgggcaaaaaatcagggtagcgatcattgttgagacttatatgtagattataatgggaatatgatgtcattgttgaattttttgtaaaaaccgacaaaaatgaaaacaaactctcataaatgttaagcagtactataagcattccgtatctaatttgcatttaaatggaaaatgttatattttcaacatgagtcaaggagcaaaattaataagtcatcaatgttgcttatgttcaatgctgcactttacccaaacttaataggtcattatttccactttagagtattaccgtttgggagattttgtttcttcacgggagggtcacattttcgctttttgttttcggattaggccatcacaaagagttagatgtttgtcagtgtaatgtttgttttacagaaccacagaagggagggtttggaaactactaatgatttccagttcattagcacctacaagttctcatgcatcctgtttgtttcctccaccaaggaggtgccgagtaatataatgaagccagtatcagtggtgtgctacttgtgtagcagtgcagaaaatgtatttttatttttccttaagaaacagctcttgctaaacttaagagaaatggagctgcacattcctgggaaaaacctatgtgggaaacaaaaactaattagagcagcaaatgtgatgctctcaggtaattgtaaaataattattcccctttagtatcatcaccgtgtaattgttccatccaatatcctcatgctctgaatccagatgtgaagggatggaaaccatctcctcctcctgggaatgtatttttcatttagtgagagctttagactcctcctaaaggacttttaaaagaaaggggaagacattgagggagattttgaacagcttcactctccccatttgttctaaatcatgacagaaagtgattactccaactgtttttatagaaatacaattccagttatgtggctgaaatgccttgtgagcgtatttgagatttacgcattggccgtgccaacctggagttttatgaacagtctcttttatgaactgcagattgtatgttctgtttagatactaaaagtgatgttttaaaatcagctgataatttaaaatgtaatgctaataagtgtgtagtcctgtggttttcaaaatgacgtatgagtacaaattcaggttttggttaaattttatttactccatttgagtgaatgcctcagagccaacataaccagcaaattattagacccattttttttcctcctaaagatttatgtaaattaagtttaggctgtatttaaactatcaggtcggctttattagtctgtgtttttctatcaggttatgtggccttttacttaaggttgggttttaaatgaagaaatctattctgaagagatcttcatttaaacaatctgtgcgtcctccagatcagcagcccaggagtcacctaggtagttgaccagtttgccaggattcctctagtgctttaaaggtaggagttagatacaatattttgattttaaatctcagtaattaaagaagtcagtcgggtacggttgctcacgcctgtaatcccagcactttgggaggccgaggcaggcgaatcaccttcaggagttggagaccagcctggccaacatggcaaaaccctgtgtctactaaaaatacaaaaattagttcgccgtggtttcgcatgcctctagtcccacttacttgggaggctgaggggggaggatcgcctgaacctgggaggtggaggttgcagtgagctgagatggcagcattacactccagcctgggcgacagagcaagactccgtcttcttcttctaagaataataatagtaataataataataataatgaagaagtcccggaagtttgtctcctcagtgagactgtatgcagtgctctctgtcataaccatggaaatccagtctccccagtgccacagctgatttgtctgacatttacaagctccaataggactgaagatttcctactttcacagatgaaggtggtgactcactactcagggacaatgaaattaaggtcagctgatttatttcacatcttgacatagcttttggacagcttaaattgtttctggtaccataacagtgtactcccaagtactttgatttacatactaagtctaaaattctgtgcttttatgctgaaagtcttgattttatgctttttctaaagaaagttcacagcttgagtaaaactcattaaattttaaggtggtattttatatcctttctcccaaattatgtcttcctttctcctagtagcaggaaagttgaccctcatttatttgacacaaaggcaatcagttggtcttttaggctaaaagagtaaagtattttgtcacttacttgaatgtggtcagtaggcctgaaatatgtgtgggggtatatacatatatgtgtgtgtgtgtgtgtgtgtgtgtgtgtgtgttatatatatatatatatgtatgtgactgtatatctggaaagtcatcttattggacatatggttaggctttgtgtccccacccagatctcatcttgaattgtagtcaccatagtccccacgtgtcaagggagagagcaggtggaggtaagtgaattatagggacagtttctcgtgtgctgtcctcgtggtagcgagttctcacgagatccgatggttttataaggggcccttcccccttcgttcaacgctttcccttcttgccaccttgtgagggaggtgcctggcttccccttccctttctgccgtgattgtaagtttcctgaggtctccccagtcatgcttaactgtgagttgagtaaaactctcttctttataaattacccagtctcaggcagttctttatagcagtttgaaaatggactaatacagcataggtcttcgctttcttaaaatatttaccacgaaatggtctttggttacaaaagtcatcatacttgtgtttttggattattaccattgtaactgaaagactttatgttcagaaaagtttcacattgtgaccaaagatgtactgcaaattagtgatactgctagaaaaaagtctcaggactgtatttcaactcttctgcccagaactttggattaactctgatgaagggtgaagacaacctcactctggcagttctgccatgttactgggtgaaaagctcagactctttcccttttgagggcctcttttctcctcactgctgagtccttggatctgggggcttcttctgtttctcagtggcaattaagatgttgctactcctgaggtcttttcagagttagagtaggaagaaaaacagactcttcacagagaaatctggacagttgggcctccacggatgttttcttgttatgcagacacatacggtcctccgcggaccacaccccctaccttgtgcctcttggctgctgcttccattttatatgatccatgtcatgatcccactgccacctgttgctgttgaaaggggtccttgaaatttttattgtctaatgggagtccagcatataaactgaacacttaaaaaaggtgaacgttacagcagattcacaagcccggaagtgggtaaattggtttaaaccaacttaaatacctacccgcctcccccgccacacacacccaggtgttttctctttggaactcggggggaagacattgggtatcaagtaaaacagggttgaaatcatttggtccttgaaaactcttaggggaataatagaaagatgatacccaaaagtgtgaagacagaaagcatttgttagaggactaatgtggatttacttcgttgttttgctcttcactcctgaatctctgtaccctggcctagattcagtgtggtcataaccagtacagagtacagctttctctgaagttgtcttgttgcccttcttatgttttcctgatttatatatatgttttaaaaaatctcctttaatgcccgttttatccttttcctgagcggcttcctaagtttcaacagaaggggccacagccgtctgggacttagttctcagggttggagcctcgggaggagagcagtatccaaatacctagctcattacttgtaaattccactggagcagctgcttgtttctgcgcattgaactgtattttgacttcctacattataggaggagtgttgagttttcgagttgagcataagggtggcgtgtttcggaatgattaactttatggatgtctttgtctgggccagctatatttggctatgctgcagctgtgtttgccttctcaaaattgtcaccaggaggcctccaactgcaattagtcacttcagtccacgctggtaacatctttgctcgtgactcccattgtccagccagccatcttttcttggtgtcaggtctgagagataacacaggaatcctttgagaagcctgaatgctgctggcagctctgtctcaaagcagtttcttaatattaagccatccttacattgcctcctcgtgcatttgggattcttctttcttttcaccacaagctcatgttttcctgtctgctcgttcccccttttcttttacgctctgatgtccgaaagttgccgccagcatcaaatggacggtgtttcttcctcttctgggtacctagagcgcttgggaatgcatttttacttctggtgtcttagagtccccttacacaagggcccctttcctgtgttggagaggagactgagaggcaagtcgttttttttatcttcacctcggttgagtacttgctacagaatttacctttctttcgggaggaattgaggaaatactttttcttactacaaagaccattttaattccattggctatgcgtggtttttaatttttcatggaagtaacttcctcttggattgttcgacttgccctgtatgtcgtagaatggaaccactagggacatggcttcagggcctctcccagcaccagagtggaagggcatccttcaaggctaggcgtcctttgccactgtcttatgagaatgcctggcctgccttctaatctgttccatgcctacttcaagtctcagttgacttgtcaagattcctcgtctagaaaataaggacaataaaatacgctgcttacctgtcccacagtattaccgtcagactaatgttgggaaagaaatgacaacctaaatattttatagcttcctggcacttaaaactggccgcaagttcccccgcatttcccgggagaatcaaatttaatggaacttcattgcagctgaagagtgaatgttttcttcttcggaactttcatgcttttaagtctcaggcaaagacccataaagcattgttgctcccaagtgaactttcagaaaacgcgcagtccctaggacaacatcatgaagactgattcttttttcttcccctcacctttctgcatgatgattgagaagttcaatgaagttcatgttccttctgtgaactagtggtcagacctttccattctgggatgggggggaagcaaaggcagtatctccacgtggtccttctgaaaagcccttctctacaccagattttgattttcttatgggaagagaatcagccacacgatatgaaggctggttctgacataatgggaatcacaacccttgcagaaacccagccgttaaggaaacgattttttcttttcttttctttttctttttttttttttgagatggagtctcacactgtcacccaggctgaagtgcagtggcgcgatcccggctcactgcaacctctgcctcctgggttcaagtgattctcttgcctcagcctcccgagtagctgggattacaggcgcccgccaccatgccctgctaattttttgtatttttagtaaagatggggtttcaccatgttggccaggctggtctcaaactcctgacctcatgatccacctgccttggcttcccaaagtgctaggattacaggtgtgagccaccgcacccagcctttttttttttttttgggagatggaatcttgctctgttgcccaggctagagtgcagtggtgcgatcttggctcactgcaacctccacctcctgggttcaagtgattctcctgcctcagtcttctgagtagctgagattacaggcccccacctggctaattgttttgaacttttaatagagatggggtttcaccatattggccaggctagtctcgaactcctgacctcaagtggtgagtccaccttggccttccaaagttctgggattacaggcgtgagtcactgcacctggccaaggacacgattttgatggtatgaatatggagcagagaggtctgtagacctggcagccttgggtggcctcataaggtgctcaggccgcagaatgcctggaggatgtagatggagagagtccttggggaaatgacctagacaaggaattggtgatttttgccttatgtggtggtgtagggttaagacaaggggtttggggtatgggttatctgtagcatctatgtggtgtccagctgcagggtgtgtcctggttattttggtggttaataaaaaaggcacttctttattctgatgtagctgatagggtctttggagtgctaagagatcagagtctccacagaatgtgacagtttgctcccagtgctgcaagtgacttgatgccctagatcagacagcacagattctgtttggaagcctaaagcctcggtgtgtgaatccattgttgaggaatatcctccacgacgggccaggggaatatttggcacctactgtagctgagagtgtgatattgactgtggagaagctctctgggctgtgaatgtgacctccaaaatgcagactcttgcctctcatcacacagcactttgcattagggtgaaccagggaactttgctggaggcaggggggcctttggcaatatcaaagatgactgttgttgctgagattcttgggaagggaaaactaggtctgtggctgaaagctggcaaaatctttggagaagagggccagccacacagatactacaaatgtttctgtacaaattaattggtactttgtaattagcactttttctcttatcaatgtccaagaagtctgattaactttataggcagactttcagttgggccaacagttttaaatctgcctgttgtaaaaagtgaccaaaattggacttttgtcacctcagaagccacgtgattggccacacttttatcttgcctctctctcagtctcgtttttcaggtctcctaaggatgtgctacttttgttccagatttgtttccagatgcctgctcaagtaataatcgtgcagaccccagaagccagaaaacattttccagtgtcaaccaaactaattccttgccaatcatacgctgctttttggtgtgtgtttcttttaattctgattactaacactttaagggatgctgccttcctgtggttacattttctgaactattttatgagattagttattcttgatttaggatataccatgggccagccatcaggctaaggagtttatattttatcaataattctcagaaaaaatttcctcaataatttgtgtcatttccatctcacaaatgaggatattgaggttctaaaaggtggtggtactgaaaactcgaaaatgtacctctgtttctcatttccaaaatctgaggttgcacctgtgtttctcatttccaaagcctgaggatgcacctctgttcctcgtctccaaagcccgaggtcccacttctgttcctcatctccaaagcctgaggttgcacctctgtttctcgtctccaaagcccgaggtcgcacttctgtttcttgtctccaaagcccgaggttgcagctctgtttctcacctccaaagcctgaggttgcacctctgttcctcgtttccaaagcctgaggttgcctgcaagtctcttgaggattttttggtgtaaacaggttgagtttctggataggtgggcatattggcagctgaatatgtgggttttgagtgtgaaatacaggttcttagctatgacccagcaatcttctacttgttctgtgctcttccacataaattgctttttcttgattgtatttcatagagcaatttctgaggctggaaggcaggagcattgtaagagacatgtcagtggatggggacacccaagcagtgtcaagatctcttaatgcctgaggcagattctcacttactgccaagataaagaagcaattaacattgactgctaaggtggacacttattcttcatttatgataacggtatattttatgaagaggtttctttggaggatttcattagacacctggcattttcccccattaacttccaacttaaaaatttttgcatatgacttagacgaatgcttggccttctcaggtggcgctacgccttcttgtgaattagaaaatggttctcaggtggcattttgtccccacagcccacctcagttgatgaccttatgcagtatcctttctacagtaacatccgtttttactccctcctccttaagtaggcctcgtaagtaggcaatagaataaatgagcctctatgcaggatatcagtggagtttcaatgatggacagctgtggccagctgacatgtggtacctggtccatttcaaggatcattacactttcagccactccacagctttgtgctcaagtgcataaacatttgatgggattctgtgttttcagcaaatcataaatttctgtctacttctagatacccaatgtaaaggaagggataatagaaaagttagagtagaattcatgcatgggttggcctaacccacaaaccatttcatactgaacattagcttgtcgaaatgcctttactcttggcaggacacaagcgccataacctaagaggatgtgatttgagtggagttttcatgccctgtgtgcttattgtattcttgctactgatgcaaacattatctataattacattttcaagtgactgaaaattgcaggctttgtggaacaaaaatacagccaaagaatggaatgtatattcactccaccctcattataaggctttcagaaatcagactgtaaggcccaataccatggctctcaactacgtgatactaactccattctctgatgtttgaacactttgtcaaaatgctgggtttccaatgatgatcgtataatttgaggaaaatgctattacccttttagcgcttcatttgctccattgttgactcaatcacagtggcacctcctcacacaagtcctctatttccaccctgtgaaacaaacacaatttgatttagatcgaagcatgataggcaaagttgagaaagttggttgaggtgcatgccttcttggggcaggtgcgattgcatccctgggacattatatgtctttacatctcccagctccacatagggcttagccaaaaaaaaaaaaaaaaaaaaaaaaaattgcttccaggggccacccactacatcatgggctctttctttgtccttagaacctggctttggtaccagaaaaccatcctggtcaattttactcttgtagacacaagatgagacccagtttctaatttcagcttaaaccccttgaaattgttaaagagaatctagctggatggggtgactcagtgcctttcatcctagctactcaggaagctgaggtgggggaatcgcttgaggccaggagtttgaggccagcctgtccctaaaaaaataaaaataagagaatctgacatgttatatcttagtattttgttcattgttgagtagcattttaaaatctaaggaactgtttaatgaaatagatgttccttggttttggatggaaaactaatgagaggaagaatttatgatggcatcgttgttttgtttttaaggcatgaaatttacaatctacgtggtatctcacgatgttgtaactcactttccaggccccagtagagtccaaactcttggaaaatttaaagaaaaattattgtgatggctttatccaaaatagaagcagaataaataattgacgaaggttgctcaggaaacctatagaccattcctgattctctggtgtctgtgtctgacaggatgatatgtcaccaaataaatgtttattgggtcataattaaattgtgaacagttaatgtatatatagtgaattagatgttccccaatatgtatgttgtgttaccttttctaacataaatgataaactcaaatgtatgttgggttttggacagactattttgtactgtaatacaaagattaccaattaggtattaacattcatggagttaaaataactttggggtccaggtgaaaagctttctgagtaatacagtgcatcgacaagggtgttttcattgtttgtgtaaatgattgttacagcttttgaagcaaagcctctacagtgaaaattctgaggcatagacattcctcatcaaatatcactgtccagtggtgaggtgtgagggcaactcaatttgtacatctcatgaattctttctgtgaatcacaaatactgtctcaatgttcagggcattttttttttttttttttttagacagttttgctcttgttgcccaggctggagtgcaatggcaccatctcggcgcaccgcaacttccaccccccaggttcaagcgattctcgtgcctcagcttcccgagtacctgggattacaggcatgcgccaccacgcccggctaattttgtatttttagtagagtcagggtttctctatgttggtcaggctggtctcagcctcccgacctcaggtgatccgcccacctcagccttccaaagtgctgggattacaggcgtaagccaccatgcctggcctcagggcacatttttgacaggttatttgttgaggcatctgactaactgcctgggcttttgatagcatggattcttagccaatcagcaaaatttattttaagaaaggtaattagactagaaccaaagtaaatttagcttttaaagttatctaattctcagggtttcttgtgagcccctacagtggcaaattgattcccctgtagtgttgtaaatacagtgtgagtcagaaaatacattacagttgtacagtctgtacagcagatcgaatagttaagttggacaactgaggagtttaggacttacgagttacaagcgacccattattgttggactgaactgattagttgttttgttgtcacttggaaacaacctaaacatttctgtactacctgttcccttttttaagtctgaaatgtctgccagtgaataagagttgcagtttagcattgttaacacaaatatttagtctctaagtctcatataatgtgctaggtggctgccggctgttctaggtgttacaaaaattgtatgaagtataacaatagttgttagattacaagcttaaatatttgatgactctgggcttttgtcctgttgactttgcctgtattttcttgaaggaaacacaagtttaaaatgaagaaagagctgtacttctgtgttgttttggggctatgttggattaataaggaatttcttgttgagatacaagaaattaaccgatgtaacttttaagaccttcattccttattctgtagatcaggtgaggtaaatattataatggggcctcatctttaatttttattttttttgctgcgtctagatccctcctagatgtgttaaaaatatttcatgtgttccttattactaagaacactggaagaaactgttaatttttattttttttgctgtgtctagatccctcctagatgtgttaaaaatatttcatgtgttccttattactaagaacactggaagaaactgttgattggtggaaacgtgcacagaagcccctcttctgtgatcttggccatttggactgtagcatccagttagcttgtgatgggggaaaatcagcattcatcaaaactggcgatgtggcagttctttcccattcaaaagagctgcagtggtggtggtgcactgctccattaggtcaggttgaatctggtatgatccatggaattaattgtgtaagcagtggcatctggatttttatcgagcctgtccttttgctccctaaacttctgtagcagagctctgtaatttacccgggattgggaatcttgagaacaagtagatgaggatcagtgaaattaagaggatggaattgcagccacttgattgacattcgagatccaacctgaggctctgttttgtgcccttggtactcaagtgggtgctgacctggtttgctgggatactcccagcttccatctattgtcctagcatcgtcattaatagtatcctcctttgaattaaaagtgtccaagtttggataataaattatacagtcccctttctcttgtctgatccttatcaccgcctttcttaaatacgaatgtgtgaccatgtttaaaagtctctgcgtgggattaacccaaacttttccaccaaaatggttaagactttcaaaccttaaggaaaaaaaaaaattctaacctttctccaagccgtcttcttacctaaatccttatacatagaaaagctatttaaaatttaatacaagtttatttgttgtttctaatatggtagcagcctgctgggagatgtctctctacacccttccctggtgcctggatttaatgtggaggaccctgagatgaggcttttggggaaaccttcccattcagtgctgttaataacttttccccgttctggaaagctgggataggcagctcagatgcttcagatgactcagccaaagcgtgaccacagccaggaaatgatctgatgatactgcctttgttctaacactgccctttgtgaaagagtcacaggagagctcagccagatttaatggccctggggtgcctaggtatatttttgaattttaatctgagatactttttcactctgtaaggctaattgctctttctcctaccgtgctggaatttcagaggatttttgaaatatgtgtgtttgaaattggtttcctgatttttacatttatacccagctgtttgttattccgttcagccatcagcatctgagtctcaatggaccatgtaatgtgcagctgtagccagatataatgcttcctctccctaaatgtttcttttagaagcttagagaggcaggctaaagactgctgataacagtattgcctgcattaatatacctgctggagctacacaaattctgcttggcaattttatttcatgaccaacaagcaaagcaatgtttgtgatctccatccctggtagtaatgttgacactgtatatatcaagtatatctgcactgatgtgagaggtagttgtacagctaattcaaactgcaggaagctgtctgatctgcatgcgtaaatactctgaaagccaggctgtacttaagcatcagccaggattcaggtcagacctttgccaagattaaaacaggtccataaactgactcttgaatagagaatttcttaggaaggataattttaggatcatttctcttcagcttatagacaaaccttgttcctaatttgcatttattattcaaatctgtgtttccttttgtatttgtacgatgtaactttgtttagaggctatagcttctactgaatttaattactttgcttccaggctttaaattgagggcagcttctattaatcgttaattactttcttcagccatttacgcagtaaaggtacagttactaattgagggtatgttctatacaatggcaacaggctccttcagtctcaatatttacctttctgtggggactgattatttccctaatcttatcttttgctaaacataaaagtagacatttcattgacatattggacattcctatgatccagtgttagagatcctagataaataaatgggaatcatacttggctctgggttgccacctggtggtgtattgatcccttttagcctcctcagaccaatctcctatgggaagatgatatccctggatctactattccattgctagttttacgctgagagcccgctgggggtttacagataggcttgtgcctcatgggcggctgagggaggaagcatcagtatggcctgggtgttggttgtttttttatgtcatgaaagtatgtgttccatgtgcctttggtgtatttggcaatttgtctccttaaaattcctctgttggcctatgtgacatgtgatgctttttctgattatccttcattacccctccatgccccctttcttccagcctcctgactgtgggcgtcttgcgcttctcactctttggctctcaccttgtccttctcatacttccctttttagagagcttctatcttcacccactgtattagtccgttctcacactgctaataaagaaagatgtacctgagactgagtaatttataaaggaaagaggtttaatggactcacagttccacatggctggggagacctcacagtcatggaagaagacgaaggaagagcaaagggacatcttacatggcgcaagcaagagcacatgtgcaggggagctcccctttataaaaccatcagctctcctgagacttactgtcgtgagaacagcgtgggagaaacccacccccttgattcagttacctcctaacaggtccctcccatgacatgtgggggtcattacaattcaaggtgagatttgtgtgaggacacagccaaaccatatcgaccactgtatctcagctgattggggtggaggtagggggaagctgtttctcaacttgtgatctttgctttttatctggatgtttcctggtgagctgttcctcagtctcagtagcctgggctttgagtcagccatggtagatagtggagtctatctgcttggtgatgggcacgtgctgaatgctcaagctggccacagccccatgtcaacagtttattaagagtgtaacaaaccccactaaggtttctgtaatttactaaaagaacggtgagagttgtttattcatccatttattagactcagtattgtacgaggtgaaggttcctcgtggcctagcttgggctgttgagtttcttactgacactttagtctccactttgaaatggatttaccatgatacttctgtgtcatgatatgcttctagttcatggtcctatgattttaaatttaatttttaaaacatgtataaaggtagagagcaagatagaattgggttataggttgaattaatgagcagtggcaaagtgaaaagcttgagatttctttgttttggggaagccgaagtttatggaaaaaaaaaacagtgattttagtatgtagtttctgtaagactttgtaaaaatgctctttactccctggaactctagtaggtagccatgttaagttataaaccaattgttgctgctggtgataacaggcagaggagctgaagctcgcatgagaaatgctttgtgtcccactgttccctggagatggctgcctcggagaggacccagccacaccagcaaagaggagctgaggtcagcgttcagggggtgaacatagtagcttcatttgaaaaatgacttcctttttttccatctgtagcctggcttccctttgtggagtcctcttgcctagcctctgccctatattcctaagagaaaaaatgcttctaagaatgcatctaaagtggtttgcgctgcattatatcaccaagttgtactggtagaggtatgtggtgtgtgaaattgaatggtatttcaaacggtagtgcttattaagttattgatacaggttggttgtcgacttaggcaaggtgtgaagttaatcctattagacagtgattactcttctaccaaagtacatcaaaagagtagtagttatggtactgggacagtaggaattatgacaggatttctattaataatcaactactatgcagtacaccactataaaaatgaattctagaaggaaaatttgaatatccatttcagcactgatttcatacacattacacatatatatttataaatcatatattacaaaagatggtaggataaaagtcaaggattattattttaaatggtgctctaacattagtataaatatctcacataaaaccatttaaatttctggaaccccataggtgggcttaaaactgtgataattattttaagttatactgattggattcatgtttattaaaacccttctggcatcagtgaaacttactaaacttgcttttggagttaaaaatggaaatttttacagattctttgagatcgaggtggagcagggcctcctgtagaaagccagcagtcttcttgtttcatcccctcaaccatccaccaccctaagccaagtgcgcctgagcttccacagtatcctggacaagtgtgcacacgcgcttgcatccacaccactctcatggcatcgaccatgtaacggcgataacagccgagtcctgtgtcagctctcctattagcgtggaggacactgagagcagaaaccgtgatgcagtgagccttctgcccacaacacttcgtgccctgtatggcacagagtgggtcaaacacatcagatgagataggaagaaaagtggagaatgcactttgctggtgctgagatgaactgggccaattctcatggggcacctcccatgccaggatttgggatgtaagctcatctcaaatgtagcccatcaaagctattaaataacatagtactttttggactattcctccaacctacttcttatgctggttgtgtgaattataccattagggtggtgagctatgtagtcacggtcacagtgtgtactcaaagtaccttaaaacgagttcagagttaattatttacttcacaagacactgcttgtcccatgtttgcccacgtacacatcttattttgtaagctttacacgcttctaatgcatgttactgaaaacaagttcttgagtcacagtttaaggttccatttaaagccactcaatggaagataggttaagtgtacttcataattttgatcattgaaccaggaacattatgtaccagtttttaaggctagtttcatttaggaaaaaagataattatatatctattacgtcttacatttttgtaaattccattgccactggaggaaaccatggaccagagtaacctaaagatgcatgttggtatatattttaattccaggtaacattggaatgtggtatgtgttgggggtgggatcttcctgtttgtttttgtcaagctaatattatttacaaaaaccatcccaaggactgagagcaaaatgtattgattatctttatgtggaccatgacaaattgattttttaattgagacttcctattttcagggagttcagtgtctcgtaggaaaatagtaaattttgaaaaactttaaaatgttcatgccactgatcatgggaccacatgattgttgataagggaaggtaggacaggaggaagttcaagaattctcagggcagtccaaagcagaaggaaagggtggcatttcatttatgtatctgactgccatcttaactgtgttctctgtgaattgcctccaacaatatggagataattcaaaacaagcattaacaagatatagacagtgttttggagaagaagcaaaatagggtctctgtttcgaaaacacactgtcttatgtttagtgtttaataagttcctaatctgctataataacatcttcacagctgataaactgcatcatataataaaagtaacaatagtttatggaacttttaaaggtataatttgtacagaattttaattatggagcctagaactctgagccaccaggagaaacctatttaatgtatcttctatgtagcgacgcacttccaagcagttccttgttgttctggtctggttggtcgctctgtttttcctgtgtaatggtttttgttgttgttccttggttcaacaaatgcttttaaatgcctgcttatgtgcccgttaccatcctaggtgctgggaaaactctgcatcctcaaagttatatccccactcatggaaatgattttttatttccctttgattttgtgagttcttctcttccaactgatttcaccttctacctttcaggtgtttttccattcaatattttgaatattttttcaaattatcaaaaatattcaatattttcaatatttttccattattcagggctgcattaagcctctgtttagctccatctctgtgataggttgttctctggccagctgctgttctatggcctcctgccatgaatatcttactttggttgggctgctataactaaatgccatagactggacgacttaaacaactaatgtttatttctcaaggttttggagactacggagtccaacatcaaggtgctgacacatttggttcttggtgagggctctcttcctggcttgcagagggctgccttctagctgtaccctcacatggttcaaaaaagttgtagtgtccttttttcttcttaaaagagcactaattccatcacgggagctccgcccttgtgactacaactcaatctacttcccaaaggccccacttcctaacaccatcatgttgggggttaggactttaacatacgcattttagggggacacagtcagtccatgataaacagtggtggtatcaagatgtagagtaagatcccgagagagagagggagacactacctaaggcaagacttagggaaatggtagtacagtatcgaaacccactggctatgaataatggtgttggtgtctaaacacacatgcctcaggatttctcttttaaactctgagcaggttcactcagaaagtcataccagggaaagttctcacgccatcttttgtaatgaggatgaaaaaataaagtgcagctatagatggtatcagggtggtaagacttcgtattaacaatatgatttataattcttagttctcaactcattcgtagtttctgatgagtcaagttacatgaacttttctcattgtgttttcagaccattttcctgtgacagttatataaagagatgggtccattttcatgctgtgaatccagtgggatctctgatccttccatcaggacataacattaatccctgtggaattaaatctatcatggagagtttacaatctgtaagctgatatagttggatatccacagacccattactatatatacgaaagaattgtcaagattattgggattttcatatatttggtgcatacttctttctagattactgtgattagttccattgtcatgtatgtgaattgtactaaaattatatattatgatctacccattgggggcataattatgggtacatagttagccatgggtagacttagatggatagactagaacatttctgttgaacgatttttgcatgatcaaaatttcagtaataacatgaaaaggaaagctgggggcttagcactgtgttgatttgtcagaagattaccaagaggttggttttctcttatggtagaaagaaacttacatttatctccttccctttcaaatttgttattattcgacagtagacagtatatttgatcccgagctttttaaagcctggcagcactgttttgtgttgaataactttaaactgggcagtcaaaggttagagttctttggaagcagaggtcagagcaaaggtggaaatgagagtacaattggtggacatcttggttattgctgcatacagatgattgaacggtctctcttgactttgaagactcacattgatgtttcttctaacagcatagactcacattgatgtttattctgacagcgtaagactttaacctggtgtgtcttttctttttatctgagaagctgtgcctgactgtggctgtctttcacataccacgaaagccagtcacccttctaaaatgttcaattcagtggtttttatcatatgcacaaagttgtgcaaccatcatcactatcttttccaggacaatttcatcacccaaaaaagaaaccccgtaccctttaagggtcacctcccccaccccaatttcccttagccccaggcaaccattgatctctgttctgtgttaactggatttgcctgttacatgtacatttcacagaaatgtaattgtataatatgtggcctcttgtgtctggcttttgtttaacttatgatgtttttggagatttatccatgttacagtgtatctcaggacctcatttttatggcccaatatttcattatgtataggtgccacaatttgttcctcagttgatggacatttaagatggtttggcttttaggaataatgctgctatgaacattcaagtacaagtttttgtgtgaagacttatttttaatcctcctgtgtatatgcctaggagtgaagttgcttggtcatgcaatagtttttgaggaaatgtcaacctgtttgtctaaagtggctgcaccattttaccttcccaccagcagcgtatgaggttccaacttgctgcatccttggcaacagttgttgctgcccatcccaggatcacgatcagttaagtttgcttttgtaatgagaagggtgggacacagaaagtaataactaagcccggagggtattaggcagggccagggctggtagaactcatgtctcctgactcaccgtcaccattcactgcaacattgcatttcaggaaagctgggtgaagaaaaaacacatgagaaaataataattggtctggaattacttatattcattttcccattataaggaatggaacagttggtttctgtgatctctgatgcagtccagttgtgtgtttctagcctcaaccttgccctgaacaccagcattgaatatcccgctcctggctggactctttctacttggatgcctacatggttgcatcgcagacttccgtgtcctgaatcaagctcctcatcccccgtccttcctttctccatctcactaaatggttagccagctgctccgggcagacctccagaggctttgcttctcccacattctccacatccaggccatcaacaaccttgtgggttccgcgttccacctgcagtcgctcctgctgtggccactgctttcttacgccccagaccgagtacacatgtttcccatctggactggtcacccgaccatcatctctcacctggacttgagattgtgctcggatcccccagtggcttcctcgcatacctagaaagcaagccagcgtccttaaaatatcccacagccacagaccgcctgccgcttgcagttccagcatcttacatttgctctgctccacccacatgggcttcttcgctgtcctgtgacgctgccagcacaccctcttcaggttgtctgtgctcgctcttctctctgccctgaaccctcttccctcagttgtgggcacggcctttgcgtcttcacttcttctaagaatctacttagtcgcctcatccaaaggcggtccctgaccatcatctcaaaaaaacagtgtcccatcactttctatcctcttaccttactttatccccttcatcgcattttttaccgtttaacaaaatgctccatatttatttgcttttgtgttgcttttccgtattgtctactgggatgggagccccgaaacagcaggggcttggtctcttgagcttactgatatatctgcatagcctggatcggttcttagcacaaaacaggaagtcagtaaattactgttaaatgaacaggttattttattctcccttttggcatcactcagtctttgctgccaacctattttgggtgagctttaaattttttttttacatcttgcaaaagacttctatatgtacgtatcaatttgtgtgaatctctgtagcacagtttcttcgtatataaatttgcaataattctgggcaggtgctttgagacctcatttgagaaatgtttccccccaccaagtaccagagattatgatggtaatattgtcatttttattactcaatctggttttaatacattataacagtatggaccctattagccaagtacacgataatagccttttattacaataccctaggatatactattgtaatattataatatcttattgtggttctaataaggatctcacttatatatacatagagctcttgtagttttataatatccaaggatgagactctgctgttgagaatcttatctaaaacatgataccacaataccaaaagggatattgacaaaatatgtccacgtatttgaattgcacattcatagtttaatttattcttactgtgcagcacattgttacctggaattccagattgttcaagtgccttccaggcctctactcgcctgtttattccatttaatagaatagccaaaaataagtaaggctgatattaactttggtgaagataatgttccagtgccttccagtaccctaaataattcaagaggatatgatgctgtgactgagaacttgtgttccgcagtcaggattacctaaggctgagtcttaactttatttttattttggaggtaggatctcactctgttgcccaggctggagtgcagtggcatgataatggctcactgcagcctcaagctcctgagctcaggctaagagctgggttagttttttatgtttttctatacagacaggggtctcattaagttgctcatgctggtctagaactcccggcctcaagcagtcctcccacttcaaactcctaaagcactaggattacaggagtgagccactgcccccagccattaactttataccttaacatgtcactatgagactttatcttccaatattcagtgtccttacctgtaaaatgggtgaataactgtagctaccctctaagtttgtgtgagaattcaatgagatgattcctataaagtacctggcacctaatgaaatgctcaataaatgttaactgcaattattactattaaaacatttgaacaccatgtgtgatgaaatattctttggcaaagggaggctggaatgactctcaggtaaagagtagtaaaagggctataagtagagcaataaaatgcaaatgtatgacctccgcttctttccccagagctgtacatcattccatttgttgaaaaagggaacggggcctactgctgaacgcaatataacaaatataacacagagacccccttaaggtgccatatctgtttatagcctatttaaagaacaaaaaatagatctttctgtggcacttaatctggccaggacactcacaatacccgttagaatgtgtgcttatttcatcgttacaataatgggagttcacaaatgttctctgctcttttcactgaagcctctaggggtagaggtgaaagaaaggaaacaaaatttaaaatgctcagggtttgtttttaaaggcaacgactcgttcatgaagagtttgaacatacagggagaccagctgacttgagctgtctacaccttccagctctgttttatttgctgctgtttaatgttttcctgcctccccaaccgggctgcacgccagcggttctcaaaatcacggcaccgcttgtctaacaacaccgaacgctgggcccatccccagacgttccgattcagcgggtccaaggtggggctgggaatttgcatctctaacgagttcccaggtgattgtgatgcccgtgtcaatgtgccggtcagaaaatcacagattgccagctgctgctggatgcaatttggatctccctagacgacttggcccagagttgggcacagagtatgccctcaataagtacttgttggttcactgcctctgatgacaccgaaatgaaatataaagggaagataaagtatattaaggttctcattaggcgcactgcctgattctcattaagactgtcctgatttcttttatgtcttgggcatgtgggctcagtgctaattttcatggcttctgtggtccctgaagtacgagctttttcatagactccaaggttctcctcatttaccctttcttttcctaactcatttcagacggacgctaataacagcccgcagaaccctcaggacccatacaggaatgaggattctcatacctcccaaagagtttttgtaaatcccatgtctttaatctcatttcgctatttctcaacaccctattaacataaagcttaagcccttggcttgttgctttattttctaaaattttaaatttcatcgaaactgcctccactaagctaacatgtgcttgagtcactggggagaagaaaatttccagagatgtgatagaaaacaaattgggcttgtagaggaaggattgttcggaattattatattgtcagacccattgtttatttcgctcacattttcctaggtctgagcgctggagtatttcttcaccagaaaagaattttggaggggcgggggaggttgttttgcacatcctttaaactcttcctatttaagcattttagaggaaaatgatgttttccttcatgaaaacagataaaaacaatctctaagtttccatttccactgagtccttgctacttagaagggaatacagtcctatacaaagatattaaagacctgtaaatatcttttccactaaatttctgagtataattttagtgctttactcacagccaacccatgagttcagttttgagatgagtgttttccaaagtagagtccctggaggacactaggagggtgttctgtggatgaaagggtctctatggcaaaaagaacgcaagcttagtgaactcgggtttaagcaaaataaacaggtatctttaattcagggctgtcaggatctttaatatggctgttgtgcattgtgggtatggaagagagcgatttctagagtctctgaccatggcatcttctgatgctgctgttctgcagaacagattttgggaagtactgtgtgaaaatccctacgttatagcatcgtctttgattcctaaagaagcctcagaggtattaaagctgctcttttctgtgtagattcaataggcaaaatttcaactcctttttgaagcaaaaaatttatttttagaagatttaaagtagtgatgagatcttgtttattcagtagttctctcactactgaagacctcagtgcctttcctgaatactgatttcaggctaaatttttctgggatacagacattttcattcttatgttgcctatatttagacaaagttttatttgtctaatttacccatcatgttactgttgccacatgcacttctagagtgaaatactttgggacaaacctgaagaatttttttctcttctagatgtcaactttcaaaattatggaaaaatgaactaaatatcataataaagattcactcattcataatttaaacaagcccctgaagccctctctccaaatgtaagaattgttccctgccagtttgttctcttctcaggttcattgtttggcccacacctcctcccctcaacactccccaaggctgtattccagttagtgatactctgcctgcaatgtagcttttctcagtcactagaaaatgtcaagaaagtatagtttgaactgtggaggttattaatctctacgacactgtcaaaggaaagagggagagttttatagctgcaggttattaacactcttgacaatagaaaagttgacctttttttccccctttgcatttaggctcttgcctctgctttaaaaactggcagtgaacagaatatgcatttttagctttctcagtattacgtatataaaagtagtgagagatgaacctgacatatacttgataatcagatggttgcgttactgtacctagggtattgtagtttaacttttaattccaggatggttatttgtgacagtaaatgttcccgtgccaccaatcctggttttcggttttatcccacctctacttcccgtgtaaggaatatattgacatctgggaagagttagatccacccttgtttgacaacaccattacgctgggtaagatccactaagctgtgaaaacgcattcataaaacacctaaggtagaatctaagaacacagtcttcctcttttcttgaggggcaatccaaacttataaactggatacattacagagcactgtcattttccatctcagccaatctggttcttattcactgactgtaattacaaatgtaggtgtatgaattagttggttaaaaactccaaagtgtgtgtgcacataagtgcattacatgtaaatactctgagtgcagaatacctaatttaaatgagtgacagggagcacaacatcattggaattgtcagggaaacagaaattaggtgttttacagccccgtctttgtctctggatactgcattcatgtattagaagccagaggagcttcaaaatatgtacagaattgagtgggatcttgggtgtaacctattaccatgagaaattggcaagaaggaaatcacttgttttctgcatgttcttatgtaaccttgaacaaactgttctgttaaaaaaaaaaaaagtctttttccttgcttaaaaaaaaaatcagcttagccttccagatattttcaatagctgcacttgttagtatgccatcttttttttttttaaaactgcctgtctttttttctccttacaacttcctaagttaagcctcaagtgagaatctcagcaaattgacttttagtaatattttaattattgagattattacggtgtggtccagtgtggtgaatcctatagtcgttttactcgtgtattctaatgtcaacaggattgtgctagtttagatgccctgtttgcgtctaatcattttatgtcgaaaatagatgggggagaggtcaaggacgtagtctgtgaaaacaatgtgaaccgggacctctgatcttcattcctgttccctttttctcccaacttatttgttcctatccctttctttagtaaaaaaaaaaaaaaaaaaaaaaaatactaattttttttctcaaaatgttattttgtttctgcatctccccttttctgtactacctcacgcttccggcacatacttagagaatttggactagaaagggccatagagatatggttactcataatgacttgcctgcctccttgtagtggttatttttttgtttttctttaaatgggttgtatgtgcactctgggtgttgtggggcggggagtgctaagtgtgacagtgcttacaaaacacaccttcacagctgggaggaggagaacacagtgtcattcatgcatcctcagaacattaccactgcggacgactggcagtgtccttcggggaccccgttgcccgtgtgcatgctcaggggcaccataaacacttgctgctggttccccatgccacctgctggttccacatgccacctgtggcctgtcaggtgctcagagggccttctggggcaggcagtatttatgataaatagtttcatcaggatgtgtggctcagctgggcagctccagctttcttgctccctctgggtttcctgacaaactggcctcctgctaagggcagggaactgaatggcactgagaagagttaatgagccacagaaaatgtggcgttctaagaagagaacagtatttgtgtcccgaactctttgtccgtgaagtgttcagagagaagtccagtgtaatgggcttaaaaacatcctgcttgcactgatctcttttaaatggtgaaagaaaatgcaacatttaaaaatcattaaactacattgtctggacattatttgggcttgggtttcagatacttctgggacatgcgtgagatgagtgacactgctgcagaagtcatggcgagcagaagacatttgtattattggaacctggcctggcttgaacatggagtgtcggttctaatttggttctgctggactgtagcagctcctgctgctggtggggagccagtcatcttggattcatagctacgtgcagacactttctgtgcattcttactctttaatattgggttgagcacttagctctgtagggcctgtttccgtgatctcccatcagtccctgcctttccattccaacatcaccactctgtctccagatgatcgtgcagcctcctgtcttctctctgtcaccaatcccttccaccctgcattgccagacagatcttaaggcctgtctgatggggttgtgcctcttctcacaatacccaggggctgcccttccctgccttgcatgcagagctctgcagattatgcttgagcacaggccctctcctcccctaccattcactcactcgcccactgggcctcttgtttgcctgcctccctgctttcctcctgaatcctcctccataaagcttccactgtgaggaaaggagtgataataataaaactccgaaccctgagaaaacctcgcctattttccaagaccagttctatttttagcagctagatcaagatgcatgaaagctgacagatctaatgttgccttcttgaaagcatggggacacttcttcgctgtgggaagggccaggtctgggaggggtaaggattgtgagctcaatctctatagtctttggtttctaggttttcttagaaagataacctttcttgaaaaggttagctttttagttctttcttggaagaaaagttgtattggagccagacagtgatacagatgctatcttgaaaacatcttttactgcatttcacttgaaatgcttccttacatgttaaatattgaaaacaactaaaacatagagttctcttttgattatccacctatgtattatttatggaaaatattttaaatctggcagtatccttagcctatattcctttgagtttgcctctcttgctcgtctggcttacataaactgtaccaacaacctaaacagcccatgtttataaaactcagcctgatgcctgcccgatcaagtattgcattggatttattcatttacagtatgttgaacacctaagtgccaggcaccacaatgtgctaaggtttcataacagatacggtgactgcctccatggaactccaatttgagagggagacagatgttaatcagattatcacacaaagatacaattacaagctagtttaaaatgtatgcacaggggacccgatttgactggtggtaaagctggtcaaggaaggcttcactgaagatgaaacgtttgagcttcatataaaataccttcacattgcccactatgtaggattaaccatacaatctaatgatcttaactgcttcctagactttggcaggtttttgtttttttgtgtgtgtatgtattgttaatacttttttttttttttttttggagacagggtctctgtggcccaggctggagtgcggtggagcaatgttggctcactgcaacctccaacctccacctaccaggctgaagcaatcctcccacctcagcctcccaagtggctggggctacaggtgtgcaatgccacgctggctaattaggtattttacagtcttgtcatgagccccaaaatgcctaattagctgggcatggtgttagccatgttgtctaggctggtcttgaattcctgggctcaagcaatctgctcatctcggcctcccaaagtgtggggattacagccatgagccaccattctaggctgttgttcttaatactttcttttgctaaattgtgtctgtagaacatttagggaagtctgagaagacaaccagtagagatcattaccttttttcaaagacattgccaaagttagttcagataattcatttttttagttactatgattaaaccttgcttgatgcagacacctgagattgaagcttctttatgctgttactgacctgtaggttgtttgggctcagatgctgatgcttgtttccttagatgatcattgttgcacggtccttgggtgatgtcctgtgggttatcagatgaacttttgtcctgttcagaaccaagcagttccgtattgaaaaatgaaaagctaactgcaattaggtaaactatacctttctttacatccttcaatagttttgtgtttagttggcacttctgccgatccttaacacatttctctgacggtaaccttgtatgatggtatcctttacaacgaaaggtcttttttgttcattatcttgtttgatccaagcagtaactctgcaagtagatggccccattattatggtggaatgtacaggatgataccatatcctgggaagaggaaggaagtggattcaggcactggaaccagtaaatcatgtagtagagggcttctcaggtcaaaatgttattttcctacaatatcacacaactggtccatactaacttttcagagcttcttgtccttagagtgaaatgtcatgttattctatttaacttccattttgattacagcctgagttttttttttaaatgttttcttctttaatcttgtagtattggttcattactttaaaatttattttctggaaaaccaaggttatagcaaagtaagttgtactcacagggtaaaggagacctgcagaagaatccaattcatctatgcctttgaattatcaaccataaacactgtaattatgtgacacattctctggacatttgttttattattattacagtcagtttcccaacaaaatgtcacataacagcattcttttgttccttggatcaactgttaattagttttccctcaatagaccatatcttcagtgaagtagacagaatactctgatctctctcagtattttctagtgcatgaatcctctgcttcctcttgccattggtcctttcacctgagaggcatagctaaggaatcaaaatgcattcaaacacagtcataatcagtttcaagtatgtgttgtggatggattagggggaaatactttttctctttaactcttccatttttaggctaaaagaattttttgcatcaacaaatttgttattcttgttccaagaaacacacattttttaaaaaaaaagactatttgggcattcgtaggcatactctgatatttcttttttttttttttttttttgagacagagtcttgctctgttgcccaggctggagtgcagtggcgtgatctccactcactgcaagctccgccttccgggttcacaccattctcctgcctcagcctcccgagtagctgggactacaggcgcccaccaccatgcccggctaattttttgtatttttagtagagatggggtttcaccatgttagccaggacggtctcaatctcctgacctcgtgatccacccgcctcggcctcccaaagtgctgggattacaggtgtgagccaccgcacccggcctgatatttcttgaatgtacttttgtcagttctgtttatcgtttttattaatgatattattaccaataataaaactatatttgctaattttggaaaataccccattttgatactatctaaacatagccaaaatgaattttgatgtataatttccagtatctttagtaagcaacacataattcaacttacagcctcaagctgtgacaagtgagatgttgttcataaaagagtaaaaagcctggcatataggaagtgcagaataaatgctctacgattattactacaaagctgatgcctgtttgtatagtggtaattacaggatacacagccgtgtcttttattccattatctttccttcaccaaagctttgatctttcatcttgcccttattgtatcatcccatagttactgtggtctcacgaggaagaggcggttgatatttatggcaatggttcctagacttggaggaacatatgtaaggtgctaagattttattttggcaaggatatttttaaaaaatctatcatcagttttcatcataattttttaaagaagaaaacaactgtgtatgtgtgtttgtgtgtgtgtgtgtgtgtgtgtgtgtgtgtgttaataggaccgtcttttaacttaatgtcaatttatgaagaattgaccttgtctttatctcatttcatagtggcctacaggacactctggtggacgtgtagtctgtggattggcactgactgatgtgaaacatgaaggtcaaatgaaagtcacgacaggagagttaagattgttaagggaagaaaaagactttcttttctagtggtttttttctttggagtcttgctctgtcaccaaggctcaagtgcagtggtacaatcttggctcactgcgacatccgcctcctgggttcaagtgatgctcctgcctcagcctcctgagtagctgggattacaggcggccgccaccaatcccagctacttattgtatttttagtacagatggggtttcactatgttggccagactggtcttgaactcctgacctcagatgatccacctgcctcggccccctggagtgctgggattacaggcttgcgccaccgcacccggcttctagtgtattcttttagagaaagttttgagctgttgtagattttgaaaattgattgaattacagatgttactgtaatgctcataacctgtgtttcatgtgttaatgtattattcttgcaaatttcagttgtccagaataactggaaaacaagttgatgggacagatattaactgatacttcacatgtattttctcctggtgtacttcactaggtgaaagacaaatacacattaacacaaagcagataggtagactatacctttgtagaatgcctttacaagtccacattgatacccattattctgtatctagtactacagtttcctcataatctgcatttcatgaacaggatcagattcctgtgtttctgagtcagaaaaactgagagaaagaataataaagggaactatttggctgaccgagtatcattttcctgggaatagttttaatgtggagacacaggtgccataggcactctcaggtgcatttctcctttcagaatctttcctcatccctgtgccctcatgcttcatacacttatgagtgactgggatagatgttcttggcttagatggtttttaagattcgttctaaacctgatattctgtgcagtggtttctgaagtggaaagacattctttgctaaatgtggcctaattttgatcccgattgctctcccaaactcttgatagcgtctggaaggcacggcagactattctgtaggcccagtgcaagtgctgtggccgccatcttgaaagctcttacatgtgagtcttttcttcttttccctctccccatctggagtatcccccatctagccatttctaaaggttccttttcagtcccaactgctgtattatttaaatcccatctacagcactcactacaagcaatgcttaaatctgcttttgtatttgaaaacaaagctttaaaagcagataggggagccacagagaagagtagtgattttgtgacaatggcctaaatccaagaagtgcatttagaaagtgcatttgtttgttttaaacaattggtttcagcatgtttgtccattgaaaatgggaatgctgagcccatgtatagataaaccctctgatggaaactggagatttttgttataggtagaagtgtgtgtgcaatatgggaccctatattccacaattctataaagctctttaaaatgtattcataatcattctaataattcattctgcatatagaatatgccctctcacactcagtcatatttgtggggttattccttaaatgaggctttgttgtttctgcaggaaatgagtggttcgatgtttttataaatcacgtctgccttttctaagatgcatagctaggaataggtgcctaatagcttgctctgtagttgataatcaatcaggtaataatttattacacttgcatgagcttttcaacactgatagtttcactgtaagataaagagaattgtaagatgcaattataagcatactttccataaaatgcactaaggtagagagcaagaaagatggatgtggttggatcttagaggaattcttgtgcagaaagggaaggtatttgaatcgtataagaagggagtcaaggattataaattttaagagtagaatgaaatgtttacaaagcatattgatttatttcttggtagaaatgagccttgtgaaacatttaagatgaagcaggatcagaggatgcattttcatgaagatagtagaccacttatcttaggtgaagaagatactaagagccagtgttagaagcaaatctgattgatcaggcattctaatcaaagtctgaaaatgtgtccattagcaataactctgaaaacttatgccagaaaaagaagtcatagtactgggggaagtctgtgcagggaagggcaaggcccacaggaggaaaatcccacgccatgttcaaccttctaaccacatgcttctgggggaggggtgagtaagaaccgctgcgtgaagtgtccagtcacctgctctcaaatgaattccaggttggtaggttggaggggaggctgtgctggggcaattagtgagcagccgtgcctggaggccctggtaccatctgtgtaacagagaaacagtttgccctgatgaaaaatcaacctccagaggcagcagatacaacccctgaaagaacaaaaagtcccagacccgacttccatgagatgcaacagaagctaatgagccagtgtgggtcatacgaggtgcgcctgcctgtgagagcgatgcctgggcctctagaggggtaggggatgtgtggggtggggggtggtccagcccaactaacacatgcttttgctctactagcatgacccgtgccagaggaaacagtgattttaagaatgccttgaaatacagccaggtaaacacctggaggagattttcattttgctaaatattaatctatagagaaaacaggagaaaaaggaaaacaagttcatagcctgatataaacaactactcaccatggaactctcacaaaggagcctcagccacggccttgtgggggaggatagcatttgaataagtgttgatccaaagagaatgtttggcctttatggatacaaacactgattatacgctcaaagccattgacgtagtatgttttctctttttttccccccgatgaagtacttgaagctggctttttaagcataaggatgtaacgtggggatggtgattgtcagattatgacttcgggaatacaggagtcacaaaatgtttttggttaacagcctgtttctccataccccagcatcatccctttaacccatattgccagaaaaagatgcattttaagatactgcatccaacaagattctgacatttgctagcggtctaccacaaagaacaattatatttagcaagagaagttctactttctactgttagcaagacatgttaaatggaagctttttcttcttcctcttaatttttttttagtctagcttttagattgcctgaaaagaaaaaagaggctaagcaaaatggaaatactttacgcccaaccaaatgggaatagattatctgaagaggaaaaaaaaaaaaaaacggaatctaatgttaaaacctgcccttctggatccagtggaggatctggcatgttccagtcgagttgtagtatttattgcaaacaagtaggcataaaatactaaaccagtttagcttgagctcagccatgcggtaacattgttaagtactgtctgtgaattattctcctgtagtctgactgtatatagctgtcactgccctggtgtgtgcttctaatggaaaaggctgattttaaggagttacactatatttgcatcccacttcacttctggctttaagagttttatcttaacttactgtgttaaagtataaagtattatttttcaacaacctataaaagcaaattaggtgaggtactgttggttttttttgtttgttttttttttttttttttttttgtgatggagtcttgttctgtcacccaggctggagtgcggtggtgcgatctcgactcgctgcaacctccacctcccaggttcaagcgattctcctgtctcagcctcccgagtagctgggattacaggcatgcaccaccacacctggctaatttttgtatttttagtaaaagaaggggtttcaccgtgttggccagactggtctcaaactgctgacctcaggcgatccacccccctcagcctcccaaagtgctgggattacagacatgacccaccgcgcccgggcttttttgttttgttttgttttgttttgtttagagttagtatgtcactttgttgcccatgctggagtgcagtggcacaatcatagctgactgccacctggagttcctggcctcaagtgatccttctgcctcagtctcctgagtagatgggataacaagcatttatcaccatgtccggctaatttttaatttttttgttgagacggggggtttcgccatcttgcgtaggctggtctcaaactcctgggctcaagcaatgcttcttccttggccgcacaaagtgccagggttgcagccgtgagccattgcgtctgtccttctattttatgtatgagtcaaggaacagacatggttaacaaactgctacttcagcgccctccactagtaaacagaaccatcactagaacgcaggctctctgactcatttcaccatggctcatcacatgatgccattttaatcagtcagctgaaatacacattctattccttaatccctggctttttgacttgatttgactagacttgcatgtctgttttagggtggaaaacctgtgcttgagtatatttgtctttatactgtacctgatcatttggcctggtaatttgggagggtttgagccattttactaaggtggggagcaaatttaagaccgtttaccaaacagtttctcagggaaaatgggcccttttctcaccatgaggaaagtgttttgtttacctagcacggtctttttaaggctaaggctgattgaaggagaattctggtgagatggtgaaaacatatcccatgtgactgctcttgtttctgtgcctcaaagatataaaccttgaaggagaaggcttggagtccaaggaaagagttgtgctattgcaataagcccatagccttgcagactctgagatagcagccatcaggacagagtatggaaaatgcagtgatttgtatcagccagagggaagcgcagcctcaggcactggaagagtgaagggtagtgctttcacttaaggaaacttagctggtgaaggactcccccaaactaattttgttgaatatctgaaatccctggaatagtgcacctgaaggagggaatagagcctttgcatttaaattgctggagtttatctgattaggataggtttcaactttcacacgcttaagcttagcacagaatagatgctcaaaagccgttgaattggtcatagttctttttcttggattctttttatttaaaagtgtatcagaaacacatctttgaaatcagaggcttgtgctcaaaatgcaagaggaagagaagtctagtaagagagttggtgctgttgacttccttgtgaatggagattacagtatttgaagagttgaagtctagtttgtcccaccaagtcactgaacagccccatgatctcagaggtaccagcagcagttttactgcattctcatacctgaaagaacatggaatacactttgccattcaatacagcccctaggaaatgggtgaaccccactcaaaacttcctggataggacagctctgcgtgcaccgttcccggcatagtcagtggtgccttcaggattcaggggcattttgtacttctgaagagtaaggtacaagtatgccagattctctcattagaatgaaatcattaattacaggaaaagtgtaattagggtatgtgaaatattttatatggtggagtttcttgatgttaaagatgttcctgcattgcctaccctcaatgctcctgtctttaaaactctccttggctgctcttagaagtacagtgtcatcagcctttgatgtgcttggagatagaatacaggtgcaccttgtttaattgcacttcactggaatgtgcttttcagatactgccttttttttcctttttaacaaattgaaggtttatggtgaccctgtgtctgtctgaaattgtcggtgccatttcccgatagcattttcccaataacatgtgctcagtttgcatctctgtttcacactttggtaattttcacaatgtttcaaactttattataactgttacagtgatctgtgatccatgatctttggtgttactattgtaattgtttcagggtgtcaggaacagttcccatagaagacagtgagcttaataaaagttgtgtgtgaagtgctgccattctctgtctttctccctccacttgggcttttctataccccaaatttcaatttcctaattgaaatcaggtcaattaataaccctgcaatggcctttaactgttcaaatgaaagactaaagaatcaaaagcttgaaattattaattaaagctcagtgagaaaggcacgtcaaaagctgagaaacgctgaaagctgggtctgttggaccaagcattctatccaagtggtaaatgcaaaggaaaagttcttgaaggagattgaaagtgctgttcccatgaacatacaagtgataaagtgaaatagacttattgcctatatggagaaaattgaagtggtctggatagaaaatcaaatgagccacaacagttccttaagccaaagcttaatccagagcaagtccataactcttcaattctttgaaggatgagagaggtgaggaagctgcagaagagcagtttgaagctagcagaggttgggtgatgagggtgaaggaaagaagccatctccatagcatagaagtacaaggtgaagcagcaagtgctaatgaagaagctgcagcaagttatccagaagacctagcaagatcattgatgaaggtggcaacactgaacaacaggtttttcaaggtaaatgaaacagcctgctattggaagatgccatctagaagtttcgtagccaaagaggagaagtcaatgtctggcttcagaggacagattgattatcttataaggggctaatacaactggtgactttcagttaagccattactcatttactactccaaaaatccttgggcccttaagaattttactaaacgtactcttccagtgctctgtaaatggaacaacaaagcctggatgacagcacatctgtttacagcatggtttactgaattttttatttgtttgttttaattgaggcagagtctcgctctgtcacctaggctggagtgcagtggcatgatctcagctcactgtaacctttgcggcctgggctcaaacaattctcctgcctcagcctcctgagtagctagaactataggcacctgccaccacgcccaggtaattttgtatttttagtagcgacggggtttcaccatgttggccaggctggtcttgaactcctgacctcaggtgatctgccctcctcggcctcccaaagtgctgggattacaggcgtgagcctggccagtttaccgaattttttatgcctacggttgagacctactgctcagggggggaaaaaaaaattcctttccagatattagtgctcattggcaatgtaccttgtcatccaagagctttcgtggagatgtacaaagagattaatgttgttttcatgcctgctaatgcagcattcattctgcagcccatggagaggaagtaagttccacattgaggtcttatttaagaaacatattttgtaaggctatggctgctatagattgtgattcctctaatggatctgtgcaaagtaaattgaaaaccttctggaaaggatttaccatattagaggtcattaagaacattcatgattcgtgggagaaggtcatagtatcaatattaacaggaatttggaagaagtggatttcagtcctcatggataactgagggtttcaagacttcattggaggaagtccctgtatggtggagatagcaaagaattcgaattagaggtggagcgtggagatgggactgaattgctgcagtgtcatgatcaaacttgaacagatgagcagttgcttcttacggatgagcaaagaaatcggtttctggagatggacacctggtgaagatgttgtgtacattgttgaaatgacaaaggattcataatattccataaactttgttaataaagtagtggcagggtttgtgaggattgactccaattttaaaagaagttctaacatgggcaacgtgctatcaaacagcatgggatgcttcagaaaaattttccctgagtcagtcaaagcagcaaacttcatggttgtcctgttttaagagattgccacatccttcagcagcaccccccccgccatcagtcagtagccatcagcatcgaggcaggaccctccaccagcaaaacgattgcaagcagcggaagactcaaacgatagttagcaatttttagcaatgctgtattttaacattaagatacgtactttttaaaagacataatgctatggcacacttaataggtttgctgcagtatagtgtaaacatgatttctgtatgcactgggaaaccaaaaaattcatgtgacttgcttcattgaaatactagctttattttgatggtctggaaccaaacctgctgtatcctcaaggtatgtcagtatttaggaacatggcacatacagaagggggctacctatgaaatatttattccccatttgatatctgaagtgatttgaaatcattgaaagatgttgacttaagatggtcaggcgactactaccaaacattcatgacttatctataaaatctccacatgggaacatatacatgtcaatattgaaactagagaattttaattaccaatttttatttgaaagcattgctgtgtgctaagcgctgtgcatagcatttcttatttcagagtaatttggggtcacattttaagttaaagcatcataaataaaaggtttattcatactcaataaaatgccttagaatatagttacagattttaaatgtgaaatctaaatatcatatccttttgaagtgttacacaaatgtggcagctgtctttaaataaaccctttttttgcttgtattcttaacgtagataagacatcgtgtaaaaatgtttgggtttaagaactcagtattgtattgatagattggtggttttcattttgatccacacattaaaatcacctaaataattctttagagacacttgtgcctaggcctgtctctgccctattaagttggactctctaaaaggtgacaatgagcatctttggcttttgcttccagaggggagtggattgatgccttttgcgttctgcatggataatctgatgttttgtagctcctggagtgtgctgtttatcggtggagttgcattcactcagttgaactacaggaaactaattcctgagtgccttcagcagatactttaagggtctgctgcgtgtcaggcatgattcccagcatctgcttgggagagacttgatcccctccttctggagtttatgcttgttgtttcgggcaaaagattgagtcttctcgaagtctaaatgcacaattaacagaatcatctcatttcactgacagatttaacctgattcttagatctgggctaggttttccaaatcatttcacagtgcttgatgctttttctgatttgtggatttggtttctctttaactacgttccacatttagattaattgactgttttcagcaggccagtcccaccagcactcccttcagagtggtctgtggttattacaaccaaggaattatttttgtttgtttgcctattatgatgaaagaaacaatacattgcttttcttttttctggaacagtaaccttcaagtttaaaatcaaacagcatttcttgttaagggagaaaaagtgtttaacactgtggaagaagtaatagctaagcaagtggtatcagttaaaccatagtgaacccatcatttaagagtgaaagatttaaaattattcaggtattttgacctgttctgcttcaaatagagtatataaatgtctcaatccccttttgcttcctcataccaatctcttccccaccccccaaatatgatttaaaatcttgatatatagagcaggagcaccaggaataaaaggcacattcaattaggggagactctttactgacctaaataacagttcattcatgagataatgtgacctgcagtcagagagaaaaatctgttgcttgagctgggataaacctggcatagtacaaaccctccggtagtcagggaatcatctaacattagaccaggtagaaaaatactgcaaaagctttgcaggcccagtctccatttcaggaatgtttctttctcaagatgtatgtgtcatttgtcacctagactatccctggtaatcctgtaatgcacatctctatcagtgtgaagtgcttgctatcgaagtgaagttccctgctatcaaagcaatcaagcagttcaagcagttaagcaatttatgtatcttaagggtgagtttcctttcataacttaaggagctcaccttctgttaaacaaggtctcctctttggagaggtggtcagtgtatcttgggattttctggtggccacgagtttgatgattgccgtgatcaaaacatcaatatctgtcctagaaattattgtatggtgttgtgtatgcaagtatttgtcttacagtgatgcattttcaaaaatgtgagattatcatcttgtttcctcaggtttctttcagtagatctgacggtaaattcttgaactgctaaagggaaattccttactaccgaaatgagctcagattcttttgggaaagagaagcgtagaaataaatgcggtacactaagtagtttgctatccagtgaaccatctagtgtgatggttagaggtttcttggatcattggaatcataaggagctccagtcgttgtttgtgatttatccatgtcaaaatgagggggggatcccacaaggatgtggttttcctctttgaaccaatagggaaaaacttaaatctaaaatatgaagttcagattttattccttcaaaacatgtttatggagcatcagtgaacaagacagacaaaccccaccccccgccattgctgagtgtgcactctagtgaggaatgcagatgctataaataaaacaacttacttagaaggtactatggtcagggtgaggggtaggaatagagcagggcaaggagaactaggagctccagatttggagggcccggggagggttgcagttttaaatagggtatcagggtaggctttctccggaaggagcaattgaaagaaaaccaggaagccactgagggattaggccacgtgcttatgcagggtagagcagtccaggcagaaagcagttatactggaagtgccccatacagcaggaatgcacctggcatgttggaggaacccaaaggccattgtggctgctgagagggcgtagggaggaggaaaaaaggagatcaggccaccggaagtggggtcccagccacacagggccttgtcagcagttaggttttccatggcaccgggagtaaagctttaaagggatttgagcagaagaatgagctggcttcattgtgtgccttgacattcatcagttgtttgataactactatttttttttcttaaatttcatctcttttctggaaccacaccttttttttccttctctgaaaattgtaacagcaatagctcatacttgctatggtgggtgtgctgccaatcactgtacgttgattaaccctgtgacccttcacaacaacttcaaacagtacatgtcatcaccttcattttataggggaggacccggagactgggagagcataaatgattcacctgaggacctcaggtcactcaagggcagagtcagtattccagctgaggcagtgggctcttaactcttaaccacagtagtgaaacactcatgccctcccaccctaagatttccccagacccccatgagcatcccacttgtcagcctcaggctctttaaccgttcacatatgtagttgcccaaaggatgatactatgtcagctggggtgtgcatgtgggttggttgcactgtgtggatcaaggtgtgtctgtcggggataaggaggaggagtggttgctgcttgttggggactcatctgtgggacttaccaattaccatttcccaattacagcatggtttcctaggtgccagggtgtggggggagctaagagacttgcatgtgtatattgaagcaagaaccccagctcctgctgcatctcctcccttccccctgagaccgctggtgtaggtgctgtcggttgtaaacagcacagtcagggtgagactgtgcttggctctgtagttactgtcatgtggcatgatagaactcttgcctacaggtagaaattataatgagggacctgaattcgcaactttgacttcactctcaattccctccatcatccagttattagtcctttaatgtcactctagcttttttatgtcttttagcgatatcatctcatgattttgctgttggatttggaaaggaggaacctcagcttgtaatagaaatgtatgaagtgaaatgagttctaaggaggaagccattataacctcttgtaagagtacgtaaatgtgtacatatttggcagattaaaaacactgggcttacgttaagtcatgatattttatggcaacaagcattctgatagccagtggaaatatatttttgaagtgccggtaaaaggcaggtcgtccattggggaactttatttctgaatttgctaagtaaaacttgcttgcaaatgtgtaatatctgtagcacactgctcttattaatccactggagctgacttcctgttgtccaaggaaaatgagaacgcttctaagtgcctgtgtggcgtatattctactttaaataaaattccacacacaaggcaaggacagtacaagccttttagaaaaaaacaaaacccatgcaagacaaaccaaatctaaatattgatttaaattggatcatagctctttagacaacacctcttagtgcccaccggttcccaagcaagaaactctgtgttctggatagttgtaaaagaaatagaacatgcttcccttgtgtgtttccagtggttgaagttgaaagaacacaggttagagtcagatcaggcatgaatttaaatctcttttcctatttattggttctgagaccctgggcaagttatttaaccttctaaatcccactttcccgtctgtaaagtgaaaatgggaatattcagttggcaagattttgagaattaaaacagaacattgaacatagaccacctgatcccagtaggtacttagtaaatacttccttcactgttgtcaaggatcacacagtaggggatggggggaggatgaaaatatgttaacaatctcttaggcaaaaattctgaagcaatagtgggcacttctcacccattatgacagttatttcacatagtgtggagatagaaccaaatttagactcattttcccaggtccctgttgagaacctactgtgtgtcatgtctgattccagatgctgaggaaacacagtctctacgcttatttaaagtttattgagagagcagacattgaccaaatactcacactaatcagaccaataaatgtcaaaccgcaactgtgttagtgctatgagagagaagaaaatgatattacaaaacagcataatagacaagtttgacctaatcagggagatccagaaaatcttccctgaaaaggatggcaatgatgccaatatcttaaaggtgaagagctgcctgcaaccctcagtataccatcagggtcccttggaccccattttaattttggagtttcttttatgagatgccttaagtgctttaaaggattgctgttgcataaatttaatctttcatagaggtctttgaaggaacaaacagaacattatgagaacattatttcttttttttttttgagacggagtcttgctctgtcgcccaggctggagtgcagtggcgcgatcttggctcactgcaagttctgcttcccgggttcacgccattctcctgcctcagcctcccgagtagctgggactacaggtgcctgtcaccatgcccagctaattttttgtatttttagtagagatggggtttcaccgtgttagccaagatggtctcgatctcctgacctcgtgatccacccgcctcagcttcccaaagtgctgggattacaggcgtgagccaccgcacccggcctcattatttcttttaaggcaaaaaaacaactcattctgtcttagcattaccacatagctctgttggaccttttgtacacctaagacacgttgtgacgtcttagtggtcttttctgtatcttgaaacattttcctatttcatcatctgaggaatttgttcatccatgcttatcaattattcccaaccatactaaaataaatgttagaaaagcagtgagtgatggaatcaaatataaggctgatgcaatagtgaagtgttattatattatccttgagttttcttactgcatgacccacagttttttgtatctttcaagcaggtataaaagaagtcaagaaatgtttttatgtaaattaaaaaaaatctctggttgaacagagtttagaattgatcattttctcccatgatagcaaagaaaaggatcatgattactacatgattcagaagataaatgccaaaagacagaagctctctagactctaatgatgatggtgaaattgatagtgtaagtgaaatctcagattcttcagacgaagatatcccagatgaattttcctcaactcaggaatcatgtgagtcagtaatgcatttcaatggatgaaaaggaaatacggtattcatatccagttagtcattcagtagggagtacttcatcatgcaacattttgcagcaaaaacctggagcattctgtttttgctagaaggacatgtgacaaattatttcatcttttaagatgtttgtttatggaaaatgtacttcatatggtttttataagtggacaaatgcaggtgtgtatacagaggtggttagaaggaatatatgatgtagaaatgaaaagaatcattggcttgtcactctaattgattgcaccaaatccagaaatgaaagtgtttcgtaattattaagccaggaatatggctgtcctttcatcagcaaaactatgagccgtcacatgttaagatactgcgttttgatgatgcagctacgaaaagaaccagaagtaatgatgagctagaacctattagagctacgttcaaacctagagttagcatttgtaaggtggatatattccagcttcattcaggacagtcgaagagcagttagttgcattcaaggaagttacctgttttgagtatctgaagcttcaaagctaggaaaattggagtaaaaatttgggtttgctatttaagttatcactaatgtttccaataatgtttgtactcttgttttattctctaaatcattctttaaattcattcaaaaagtaaaaaaataaaagaggtccattggtgatgacccttttttcttcgtatacagtgggtttagcaggcaaaggaggagggaagagaatttcaggtagagagaacaacacatgcaaaggactcagggtaggagacagacggtttgcttgaactaagtgaaggctcaggtggtgggaatgcagagagcaccagcggtggggcgaggctggagaggatgcgggcacccatgatccagggacctgtagacatgaggaggatttcttccccgattctaagaacaagggaagccatctaagggaattaagcagaggacgggcattgtcacacttggattttaaaaagtgatgatggcatttgaggtgattttgaaccaggcacttgtgcatacaggactgggcctggtgagaaatttccggctggaggtgtggagttggaggttcatctgcatgtagttcaggtgaacatcttgagtcgtgaaaatcttgagcaaagatgaaatcatctggggggaggggtataaagtgagaacatctaagtcccagtgtctgggaccaacaatactttgtggcctgaagagacgatgagcttgtgaaggagacggaggaagaacagtggcatgggagaaaacatgatactgtgtgaaggaagacagaggaggtgaatgttcggggaagggtgcatagcatcagttgctactaaggagtctagtaagaggaaaacgaaagaacaaaagttttggaatttaccaacatagagatacttggtaaccttagtgggagatactccaataaagtgatgagattataggttggattggaactagccagctatgaaatggaaggtaagaaaagaaggggatagtatagatgactattttgagaaatttggctatttaaaggtggtagagagtaaagacacagtaatatcaaatggccagataaatacagcagtgatcctatttattttaatcttgtttatgttttatttatcgaggctaattctgctgtaatttaaatcagttttctaccttcatgaacgacttgagagctcctgatccctttgaattgtcgtgcttccctgagttccacttggcctgtgttttgcagcaagcctccagctaggacatgcgctggttcttgggagcaagctcaggggcatgaagttttattgcaccaggcatccaacatgtcttatcttggtttactcttcacaacaactatatgaggttggtttcattacctccgttttacagatgataaaagtaaggttcagaggaggctacttccctgccagagtcgaacatctaggaagagggagaactgggattcaaacccaggtgactgaggctacacatttcctgacttatcttcgacacaaagataacatcgcagttgaaataaactgcctttcacaagagatttttccactcaaaacccagattttggggcttatttttattgctttcattcatacaatctgtcagtacacagccaattcaagatcagctccctttcttccccgctgttgcctcatccaatgtgtctcttaactgtcttgctgctggaagtagttctgagaaatgaaaataataaaaccagtgttatttcccagaggctttggaaacaagtacaggattttgtttctgctgcttcaccaacccacttattataatctcagttcttcttacctgggaccccacgcaggaacaaaacagatctgaatcctttcatatctcacccctgacaagtcccgagtcaatggggtcatgttggtgacatgtttggacatgtatagaaggaaaactggatggaagtcataatcagcattgtgaccatgacaagttgatcccacattaaaatagaaatgttgaattggtgacgacaccgtgagtttggagattgccttttgggttatgtccttaggatcacacagcatggtcaagtggtccaagatgtggacagctgagttacacattccaggtgaaacagaggaaagttgatagaggtgaggtcgagcaacattcttttgtcgttttttctttaggatcaaagtccccatttaatagatgttttcagcccatggaagacactaatttgagagaattatgtgtttttctctcccagggttttgtaccttctcctcctctctctaatgttaacttatagaacctcttttaagtgcatgtgacaagttgtttctttgccttgagggaaagattttgatgtcactatgtgagactcaagtctttgatgtttaattgtattttacccagatgacaatgaatggttggactgtgtttcctgcatattgctaagaccatgaccatagtggaacctctacagtcagtgctcactttgtgaggctggagtgtgaccacttgcccctgggaggccacggtagccacaccccgttctttgacagcctctttgagcataagagactctgggtaacatagcagattctggactctgggacaaaccagcattattgcctgagctgatcttcactccttctgaattttaaagcaaaggatatagaggcagccccaaccataggagcacaagagtatctcccatccctgtggagtctgtagatggtgacccttaagtttactaacacctcgggttcacaggtatcacttgagttgtggaatatccatttgattgatattcatttaggtgaatcctgatttcccttttttttttacattataaaacggaggtatgctaactgaggatgggaagcagatatccctgaaacataataaaattggtttttaaaacatagaaaacatttttaataactatattaaaatgttaatactatactaataactatattaatatcctattacattatatattataagttattacacaaatcacactcttattgtacaacatactactaatacaagttacatattttagaaatacaattatgataaatataaataatgctaatataattataccaaaatattaacatgtcaaatcttagcaataatacttgaattatgaaacattcacaaatctggacagagcagagtgtaacactggctagtgactcagtgggcctcctgtactgccctcactgtagaagaaactatcccttaagctttgacaattcgctttcaaattatgtagcatttttctctaggaaggctttttattatattttggtggcacttaagccctccagctgcaacaccccttaccctaatggttttgtcttttcagttaacgatttctgggaatatagacacgtttatttaaagtagaggaatggcagtagcagcagggattgaaacacgccgggatgtttagcaatagtcacagcaacatacagtggtatgagggtctggaattttgttcatatccaggcttaatgaattactggcttgtgatagttataaaaatagccaaatttgctggcacctactatatgtcaggcactgtgcctaaagacttcatgtgtggactctggtttcaagtggaatggtttttatatttcactcaattgtggttcactggttaacggtgaccatggcatcagaatggccttgggcctcacagagtgctgatcttactaacgctgactgaggagaaggggccaggtctccctggggtgctggtaacataaggtgatggctgcagggtggtggctgggaaacccacaaatgtccttcgtgttttacctagtgctgtgaagcagagtgagggtttaattcacaatttctttatgttcatgattttggttatacatttttaaatagttttcatactgttatcaaatgtaaaataattgagaatattcttgtaatggccatagaacttggaagctttgaatttgaaaacctaccttagataagtgatttctagcctccgtgccacagccctcgagggtctgtagttgttatcagaagttctaaatccttggacacatcaagttctgtctgcaggctaaagtatatacgagtatgtgtgtgttacaacatctattcaacctattttgttgcttttttgatcagcaaaatgtctatttcaaaacacattaccaaattcaaactagctttgaatttatatccttttgtatttttctcaagtcatctgataccaaaagttcaactattatcccatgagggtgctaaaacattttttaaaaaatatattcgtaaagattgggaatgactgttctgctgcttaagggattttttaaaaacagccaaagattggaagttacttagtgactgttgcttccagcctaggtctattcttagaaaatatgtcagcttatcctaaagaaaaatttcatcactgaattgaacccttccgttttccaaatatcttagtactgccttagaagtagcatggagttaaagggaaagatttctagcccatgcctgattgccgttttttggtttgcctaattaatattcactatgggataaattacctgctattctttgaaatttgctgaaagatgcccttcattcctgtctgcgacgggggactggtattattggcagcacttgtgtgagcagagacagtgtaggtatggtgcaaaaaatacaaccagtgcagctgagagcatggtaaccattctgagtgtcacaaaaggtgtaaatcatgtgttgcaactctgagcacatggacacagctctattccaacctctacctaggaaaatatccatttcctttgtgcgtactccctggtcttgcccagccataggaattatgtgttattcttatgttgaaatatctaaagcaaatgaatttggtctctaaataacaaattagtcaaaagttcactttcaaccacttactggaatttggggacatattttctcatagaactggtttgcatgtaggttcccagttgggctgcaagaacaacctctttgactcagaatggaattgaaagatgctttcgattctcttgtttcctcttgtcactatgggaaaatgctgctctgtcctaatccccttggccctgaaagtgaatggtcttgtcccttgtcaagtgtggcttgattgtcttcctcttccttggctggctgagtgataaaggcatggagttgccccactctgtggctccttcatttgtaagggatgttcaggagtcatcagaaggcatgttgatacttcttttactaaatagcaaaagcataatgccctttcagcattcctcttctctccccgcccccgtctcttctaaaacagaaaaaaagaaaaggttaatgtgagaactgcccagtaaaaagattatattctattttacaaccttacttattcagtaacgtatggagagcagtcctggtatacagatacatgtacgatgtgataaagtttgtgagatggtaattggattcccaaaaccggtatgttgaaggtgttttattctatctgcaaagagctctaagaaactcaaaagaaggctgctgtgtaaattaagtggattattgctgtgaacatacgtatggacttaaatgtccagggtctacagtgaatgttggtttagcgttcacttagagacttgtctttggcggataaagtgtttgcagccaagcaggtgacattgagaatgaaatgggggtgagcagccatcagcgttcttaggaaggaggagtgattcctgaaggatccaggcaagcaggtgctatggaatgatggttgaaaacgtcgtaggcaagaaaaaagcatcagtattagggcaaaatactagtaatctgattaatctcaattaattaaaatgtttaataaactgccaacatcagtatctcagaatgagtgaaacaaaaagctttcctttttcttcctgtttttgttagaagtttattgaaaaatgatatatcagcatacttttttagtgtgagaaaataccaattaagaacattagtttaactctctcttgaattattcagaaggaaaaacaagtcagatccattgtgggtatttttgttgtttgttttttagagtccaggtagacatgaacaagcagaagttaaaatagcagatgggatattgatggtcatacatgggggaagcttgttaacagcattggcctggtggacagacgccaagcttaaatcaggccaactttactcctcctcgagaaagattattggaggataaggaggatactatacagaactttgtcttagaattgtaaataatagtcaaagagcccaaattcagcagcaagcaaaaagggacagagtaaaaagaaaaggcagttgctatgggggtgcattagcattgcaaggacgtaggcttgatttgttatacagcaagagctaggtaaatgtggcctgagggctttaaatgcgcacagcttgctttaatatctgtggacagacccagatccagggctacttgtcaattctcgaatgttttttaggtgaaagcttctaagaatgctttacagctcagaattaagtactgattgcccactcacatttctcctgttaccagtgtaacatgtagcacctagcattgcctttttaaaagaatgctggctctaggtgaaattgtgtgtttagcctttcctttggtgcatactaaaatgatgtggattcattagggaaaagtttatagtcaaagaagcattgagttgatctatggacttaggtctgtttttaacttcctaagccttaggaaaatttaaatcacctggtttgagctctgcaaatcaaggctttggtagtcagtagtataatttcaggcttacaggggattgactgtaggggagcttgtcttgcagatctaacttggttattgataacatgtagcttttgaaaaaagcaggttatagtaaactagagaggttatgaaagaagtattggacttgtagataatacctggctttgaattcttgctctgtcattgactccttagtaaccttaggcaagtcactttatttttctgggcttcaatttcctcccctataaaacggtgatttcccaagtcctttgccgttttgcaaaccgttaactctgagacaagtgaatgtctccgtggtggtagtagttcacacagtgccgagggttatcattataaataccagattttcagtgtacagaggggttgtaagaaccaagtgtgcacatagggaggaatgtgtgccaacaccagaacaaaccccagcaaaaggctttgagtttgggtgcttttataatgaccaccattgccagttgtttctctcttaaagccaagtacagggaaagtaaggaaacacgactctggaaacatctgaaataatcccaagtgggtcagttctgatgagtccagtactgaaggcattgtaaggcttttataacgagagacctgatgccctaagcgtgatcaaaataccagaagtaatgaggtcaatttgttggcgttcgaaacttctgtcttccaaatactgagccttgaatgtgtatgcttttgtcttctggaaaatgatgcaaatcctctgagccttgtaaaaaaatacctattattacttttatcagcaaaatttgaagttgaaaccagaaagcaattaggttcaaagttagcgtttatcgtcgtgtgaaacatttcattgccctgtaagtgagatacattgaagtacaggggtgagcctcttgacagatgaattatgaacaattcaccataatcaaaaccatacagtgcacataaacataaaattaatatcacttttatggactctagtcccacagcttgagaagttatgtgagtagaagaaaaatatgtaggacaaagacagcagtctttcaaactgctacatcaggatttagacatacagtaacacctgtaaaagcatattaggagttttgcagctaaagcccaaagtaatccttgagaaaagcataccaaagggaatgcaaaatagaaatgagagctgggaagtgacctgcgtaggtaggctagagcagaccatttgcttctggtttgagataattccctccattcgtgtttcatccatttcgttttgaatgctttcccttggaggacaattccatagtctaatagatacagatacttgagagcttctttaagacattcagtctatttataaaaaaaaaaatgctcctccagttgctgtataattgttcttccttgtattatcctaaaggaagtggtggggggcggaatgtatgcaatgggaaatcgagttcaacaacatttctctcttgggtgctacagatttcatctttcataaacttatgctttgctcacagaaaatgattaccaagggaagggaatgaattcactgcttttccagagctgaacgagttctacctataacaggtgctcacagagaataacacagtcccaagtcgaaatagtccctaaatgtatttttccttggcctcattttaatgcttgacccatttctagagtcactggtttcattcatccagaaccttgttcatttccaaatcccctatcttccaaaatctatctatactccctacaaactaaccactcagaaaagctaggtagagatgtaacactggacttatttaaaagcttaatgggtgaatgaataattatgtcagattagaaaagagtgggcggttctttctcttcatgcacggcttgcagaaaatataaaagaatcggaggctgccagtctgtattctcttacctattacatattcttgacctgtgcaagaaaagactctaaacctttggctgtccagtggttgctgtctgggagtgatggtgctattgggcacatccattgctttgctttagagaatcatgctgctcccttcttcagcataacgtgatgtgattaaagaattaagcaaatgctgttggacccaaagagatttgttttacaattgattaaatcacttgagcagctcacattttctattgcgatttggagtctgtgtgtacagttggggtgtgacggggtgcatctccttcatgtactcaaagtataaaactacttactcctctgttttactcttactccctaccctctctggagttttaaggggactccttacatttattgccctggaagtaaaactaaaaacgttctaaaacttactgagagtgacaagagaggagtatctcaaaaatgtataaatttcatacgttttttgtacttacctgaactaaagtcctctcacctaaatgaactcttattctaaaatagctttatgttcccatctgtagaccttggttttagcagatacccagcttttaggttgaagtacagctgtcacctcaacaaaaacgtgcggaaaatgcagatggcccatggtatggtttggctctgtgtccccacccaaatcttgccttgaattgtaataatacccatgagtcaagggtgggactaggtgaagacgattgaattatgggggttcagggattttccccatgctgttgttgtgatagtgagttctcaggagatgtgatggttttataaggggcttcccccttcacttggcattcattctcactcctgcctccctatgaagaggtgccttccgccatgattgtaagtttcctgaggcctctgcagtcatgcagaactgtaagtcaattaaacctctttataaattactcagtcttgggtatttcttcatagcagtgtgagaatggactaatacagcccccccccctcctttttaggccatggaatctagcaattcaagatgaaaagagaagttgtcactcacctttccctcttgggtcagcttctgccatcacctggcagtatcatcacatatgatcagagttaccacagtagagtgcaaacagcaatagcaagatgcactgtactgcaagatgactttgggatttgttagctgctgaccatttttactacttatagcgctaagaaaaaaatgaaacggaaccatccagattataaactgttgtgaattgctctccggtttataaatgttttagccatatttatgagagtcattaaggtagagaggaaagagctttgcacttgacagatgctagttcaaatgctgattttgctactgagggtcaccttgagcaaatcatttaacctctcacaacctcaatttcctcattttaaaaatggaaataacataggtttattgtgagaattaagtgaggtcatgtaaaagatccaagtagagaccccattaatgttagttccccttgctttttctttgtttaaatgagctgtatttttacaagtcttttacagtcatgaatggataatttcttataagcacctagttcctggaccatcctaggtgcttagtaaacattcatggaatgagcaagtgggcgagtacatatatttagtgggatgtggctattactagttcctctattaagaccaggaacatacagtttgcagtttacctgtgattactcagaaaatggattcactgatggctacctggacatctataaaaataagtagactttgtacttatttcaggcaaaggcagtgttagacgtgaaagtttctgtctgcattaaccattaccttcctctctatcagacactcattctgtgagaagataattggtgcatgacagtgatttggatattgaagggccttttcattgtgtattgtagagagaaccttatgtgggtggttaatttaagacttctgtgataagcccctattccggaggtggaggaggatgctggacaggctttgctgagacagtcttaaatttcagtcaaagtcctgatagtcacctaatgaaaagaaaattatatgaaccacaagttgatccacgtctgttgtcattagaattaagttgagccagctgccagtttctagaggcaggctagggctgtctgtctcagcctgcttctggttttactttctgagtgggcccagtgagatgaattagtctggtgttcctttgaaaaacaggtgctggttgaatttctcagatgttgctttagcatccatttcatagaaatcaaacttagaaaaaattattctttaaatggtgcttatttggggatagggggcaattccagtcttataataaattcattagtgaagtgaagacttactcatgtacattggttctagcagataagaacttttataaaatgggacatgttctcatgttaatagcatcagctaaaaatgtaagattttttttgaagaagcttttacaaagggattttctattacccaggttggcaaaaagaccagcagcctagggggaggaagaaagaagccttcaggagttggtgtctaaatctcagtctcataattgaaagggtgcttcttgaaaactcaagtttaactagcatccaagttctctaagtcatacctgggacaattcaagtttgaaaaactgactaaacaaaatgttagggaaagagcattcacgttcccaatagaacatttttcccaggaaagatggaaattctacttgaggagcctgctttgctgttttggcactgagggatcagataccagccagaacttggaagagttgagatagaaaaaaaataaaaaataggagatttcattaaattcacgtgttagaacctctggaagggttctcatgggagatggatttagaaatagatgaaaatttgtacgaggagattttgacagatttgttttttctctggcatacttgacacatttttttgcccactctggtaaataagtattggcaaagggtttctagtgtgtatcagctgggcttccttgatattctttaccttaagaaagaaaggctttcaggacacattcatcacttagggatgtattttccctggcctctgatgtccccattatattggtgctgtcttccatgcatttttaactcatggagaatcaaataaaacaagttttattctgggcctgataacacatcaccctggcctagttttcgttccctggagagacttgcagatttgcctgtcactttggccagtttatcacagagtggcatgtgttcctatggcctggggctggggctgcatcccttgcttctgtttggacccagagtcctgtggagggcaggaatgaggaaggtgacaccccctgtccacgctcacacaggcccatctctgctttacctccagggactctttcagaatccaaatctgttaaaactccaagaaaacataggaaaaaaaaatggtatcctgcttctagctccttccaacagaggatcctaaagagagtccactcagttgcagccaacggttgaactttgtttcgttgcagtgataaggatgagctgtatgacctgcccaggtgctgatatctatctccaaactctcttcccgctagttgttctatatttccagatcactcagctgttcaacagaaacgtactgatggctggcctgggtgaggcactgtgctaggtggccctgcagggcagtaactgagtccttaggagacataaaaatggctccagatcctactttgctctgaatagagagtaactatgtaaatcactcctcttctgtggctctcaagtctctgatctgtaaaatgaggagattacttagatgagctctgagatcccttccagttctaaaaatgctatgattttcagattacagatctctggagtcagtgtttcacatttccaaatttaagttgaaaaccacattctttgagctcttggcatgaagtccatgctgtctgtgagtaagccatgctttatggcctgcttgcttcatccatggtaggaaacaatctattgacttcaagatacctcttgtagatggagaaagaagctgcctttgagcaaaatggtcagaatttgttgtccttcagatagtgtgtgtgaaacagccccttggtgtgtaatgattagctgtaaatggaatgaggtgaagttactttttcctaatatctctaagctgaataaatagatgtcagataaaaaattccattcatataagaatagtgttcctcctctcccttcatgaaggagtcagccatgaggatggatcgtaaccctgggtcccatcccaggacacagtgcatccttcggttgtgattgttatcttatcctgattggcagtgaggtgggggttcagggtgacccttctgttcataccacggaatctgttgacagctgacacctcttttgggaaaataaaaatgaactggggaaaggagtgaaaggaccattatcactttgacagatgctcatgattggggactgtgccaactggtgaattcctaataataggaaacaaatgtgtatttcagcttcttgactgctctgtgaaaggggcttctaggaaggaacccttaaatgtaaatgtaattgagtttaaataacagggacgggaagaggccacaaccgactggcctaggagtagcgtgatgatggtggtatctatttctgtcacggaggggtgccaagaccccaaataaccagcctatcaaggatggaaaatagcttgggtcttctatgaaagtttttactaaggtaatgttaggctccctctctagaacctcagttcagccctctgctttgacctgttttctcctttgcattttccatatttccccttttcctgcaatgggtgatgcatgtagttactctctgccccatctcaccgagttgagtggttgagagcaaggacttgggagtctgacagcttgaattggactctgggttccaccactgacttgggcaagccagtgaacctctccataccccagtgtcttcatcattagaaaggggatgatgatgccattttcatttagtgataagggagaattagatcagaaagtgtacggagagggccttgaaaccaaggctgacatgtactgaccacgtcttcactctgtgcttcccgttgccagtctcagcaaccacagcatggactatatcagacatgatttactgctccctcaatccaggggcccagaccccactattgaagggtcacagccattaccagcccactgtgaagatccggtccctgctggttgccagtggtctgagcaagtaatgttttggcaaggaaaggaaactgtcgcttggaagattcattttcctccagaagaatttactatcttgttttctggttggatgtaaccccaagaagtaaaataattcaattccacagcttaggtggagtaatagctttgttgatggtgtctgccagatatggtggtggaaacaaacgcaagtgaatatgcggctcttgtgttcagggtcttgttgggcagccagaggaatgcatggacacaagattggctgtgtttttgaacaaatgtgggttagaggtagatgctatgcttaggtccttactgggttgaaagaaggcgtgtgccagagcacaattaagtgtgctgtacaaaatgctacattagagttaaacaggctttggggtgctgagtggtgaatgtcatttggaaaggctgaagatgatgtcttagaatttcacttgggcttcaagaaagatggacagtatattaatgggcagagtcaagggtggagttgagcgagaaaaatgataatcatgcacttaaattcacagttggtataattcccaaagactcatttctgtttttaaattgaaaatgaaaataccactttaaaaaaactagtcaatttactattgatatagaattctaagattttacctgataattagtaaaagtccctaggaaagagaataaaagaaaaaaaaacccacggtctcattttctaaggtctgcccagagaatgtgaaaattactgtctagagaatacagaccccgcaacaaagaggtcattatcgtcaaactgctaaggtcatcagtatatacgcttttaaataaacccaatgatcctcttaatatcattacggaaattctaggcactaacacattaaaagtatccttttgggatgttctgctattactgtatttttcaaaggctttggtttctgaaaatttctacaaatactctggctttattagttgataatacaatgatattctcagtatttgaatttactcgtttggcttttctttcatttacgtaaaatattgagaatatggcagtgattttatatttaatcatcatgctgttcttccccctaagttaacaaaaagaagaagtataaccttaaggtttagtagatactgtcgttgaagacattggaaatcattttccagttctttacagacaagaaaactagacccaaagtaaagtgctgtggtcagcagcacatcattgttcagtggctggcctgggtctagaagccagaccttttaactcctaatttgatgttcaccttttataccataatcctgttcattgaaaaacatggggtacctatagatttgagcccgtgtattagaacaccgtgaatgaagagtccaggagattgtcaaatacattttgattggcaaattgttatttggcaataacaataatagctaacatttacaaagttctcctaagcacttttatgtataataattcattaaatccatcacagtgaccttgttattggtactgctgctttccccagtttacagatgggccgttgaggcacagagagttgacagaaactgcctaaagttacatattgggaatgcaaaagcaggcggtctggttcagggcctgcatctgcttccccaagatgggatccagttattgggagttttttgtccccacctccccatctgccttgtgtcagaagcagtttttataatgtcatattaaccacacagttaataaaacagactgcaccaccatttgaatcctgggtcaccactccatttccagaaatacatcgaggatagcactgccctggatgaatccagaccttcacaataatccagaccttttctgtcaactctctgtgcctcaacggcccatctgtaaactgaggaaagcgacagtaccaataacaagttcattgtgatggatttaatgaattaatacacgtgaaagtgcttaggagaacttcataaatgttagctattgttattgccaaataacaatttgcaatcaaaatatatttgacaatctcctggactcttctttcatggtgttctaatacacgggatcaaatctataggtacccactgtttttcaatgaacaggattattcaggataatgcagtgccatctggaagacccttatagctatagggcagctccactgaggagagagcggaatctccccagttgagcaggtgatttaaactcccctggcattcgcagcaataacaaccgtatttttccctccgcctggcctgtgtcttgactttggacaggagtccaaagtgagctgcgtctttgtgtctgctccctgcactgcagagggtgtgagctgcacgctgcctacccgggtctgatagggagtggggattagacgccaacattccaacatcattatgtaaagtaaaatagcatcattgagagaggtgaggctgagcagtccaaaatatttgataacactgaaagagcgtttttcctcttccacagtgaatccatgtctccatttgcatttgttaaaaaaaaaaaaaaaaaaaaaaaaaaaaaaaactcccgacagcaccagcaacacaacaggagagatgcacagcctgagcaataaatctctcgaggcattcagcaagtgccacagggctcattaatcttgattatttcccgtaatagataacttcacaaatcagctattattcctaatcacgcacataaagataatggatgggtaatagcttcctgcatggttagaccaaaataaaatttcatgtaaaaatatatttctacacattccagggaaaggtgttttcttgctttcttaaagggacaggaggagatgggggagcaaccactgagggcaaaattgatccttgagaattgggtttgaaggaagtattaggtctctctgatttgcttggagacattcactggcttgtgtgccaccctgtcactgtgaggcgggtttgagagacttagggccacaggaggctacagaattgtctagttccagtctctagatggtgtttgggaagactgctccccaaaatataaagcactgtgacatcagtgctgtcttacatctctaaagatggcattggtgttgagaatgtttgctgagtttgaattctgttatcttcccagggtttatggacgaccccaggaatgctcttcatataccggctcccaaactgaatgaacaatgtaaaaagattgataggtgatgagagatgtgtttcgtatatattgggatggggtgtggatgataaagcattggtattttaagcagttgacactagacaagagtaaacctaaagagtcctaggactcccaggtctttttcaaggggcaaaaacctgtgtcttttgagtgcctgaaagagttctaactgaaattgcccaggtgaagggaagtagcaactggcttctccatttaaattatgcccttctgacggcccgtcgactgacgtagaacatggcactgttatcgcacagcagcgagctgcagctgtctatcattttcttctcaaaatgccagtgcattaaagcaaggcctggaatgagacacatcacatttatgacaggatttgactccatattattcagtcagtaggaataatcagcctatcacaacaacacatacccacagaaacatcgtcttataacacacgcctttgaaccccaccctgcgttgctggatagtgctagcaaatgtccttctacagcctcttctccaggcacctaaagtcaaaatttcacctcagacttctctttttacctgcggtgaagtagttaggctttatcagaacttccaaaggagaaggagggccggtctacttcccagggcctcgcatactatacatgtttcttaaatgttggagtagaagatgattaactgttttcctgccaatgaagtctgttcttctgatacattctccactgtgacagaatcactgaatgccctttaggtagaaggcagtgtgttaggcattgggaacacaggtgttaaggtgtgatttgagcctttaatgaacgttgtgcttcagtagaggaggtgagaggcaaaagccaatgcccacacatgagcaaaggtgaggcatgccagaaaggaggctagagtgaagtgctgaggacattcaggtgaggcaaggctgtgcattgaaggaggcacgaatttgtacccatggctatgaggggaaaagacatgagaggcagagtgaacagcatgagtgaggcatatgcgtagaaacacttcggacatctttagagggcagtgaccaatccaaccagatgggaacatcatcagtggaaaatgagagataaagcagagaatgtgatgttaggctgaattttagaggactttgcatgctgggctagggggttggacattgttccctagacattagagatctagtaaagggtttatagcagggcatggcatggttagacctgtggtttaagaagatgaattcagtaagctacagaatggactagaggaggaagagcctagcagagccggatttctcaaatgatgatgcttcttggctgtgtgaatggatgtgcagaaacacatgtcttaggcagagggagccaggaagcactggtggttttgttgggtgtggtgggtactgctgtgtaacacatcatcccatacttagttgcatagaacctcttccttatggactgcgtgggtcaggagtttggacagggcacagagatggtggatggcttgtctctgtctgacaatgtctgggagcctcagctggaagaattcaaatgacaggtgactcagctggctgaggactggagtcatctggaggtgtcctcgctagcacatctgacaggtgggaagtgttaccagaaaactgggctcatctggagctggtgactgaagcacatgcaagcctctcccgtgcgttgggctgccattggcacggctgctgggtttgagagaggcgagcttctgtaggggggagccttctagtagaaccaggagaaagctgtacagtcttttcagcctagcctcaaaagttgaacagtgccacttctgccacatccttttggtgacaagagtcctaagagccagcccagattcaagaggagaggattggactcccactgtcattggggatggcagggtcacgttgcaaaagagcatgtgggatgggaataatttccggagccatctttgaaacacacagtaggccacagtggaggttggcagccgatggcagcaaagatgactaattcagttaacacttgctgagtttgaggtgcgcataggattttgaaggtgaaaagggtgtagtaactgaagatagaggactttacacaccagcctagagacattgaagacttttaagaaaggagataaaagcagagatagtggccagagataagcgtaactgctgcaggcatctcgacatttagaagagcaggatgaggaacccaagaaggggagggacagactgaggagaatatgagccacagtggctagatgaatgaagagcgtgaagacaggagtgtcagtatatggtctttgaaagaggtttcagtggctggtggaagcagaagccagatggcaattgcttaaggattaacgaggtagagagaaggcagaaggcatgagaggtatatccaaaggagaagaaatcaccctaccaaaaatatacatgccctcatatgttcatcacagcactgttcacaatagcaaagacacggagtcaacccaggtgcccatcagtgccaggttggataaagaaaatgtgttgtaccatggaatacttcgttgccataaaaaaaagcatgaaatcatatcctttgtagcaacgtggatgagttggaggccattatcctaagtgaactcatggagaaacagaaaaccaaataccacatgttgtcacttgaaagtgggagctgaacactgggtactcatggacatgaagatggaaaccatagacaccaggaactccaaagagttgggaggaagggaaggggacagacatcaaaacctagttactgggtactatgctcagcaccagggtgatgggatcatttcacaccccaaacctcagcatcacgcaatatacccaggttacaaacctgcacatgtaatccctgaatctaaaatgaaatttggggaaaaaaaaaaaaaaagtaggcctagggagcaccttgaatgctatgaagggaaacaaggcggtagaagaagtaatcgtggaagacttaggaaaagagaggatttttgtatatgtttgtatttaaaagaataaatggtagttttttcctcccagattgaaggacttatttttgaccttcagaaaatatgaagtacatcatgtctgaatctggatatgctgcttttatgtacttctttccctcctcccaattaataaaaaatcaaatgaatttctattttctactgtttaatagttggaaaggattttataggttagaatactcagacattttaacagactcacttgagaggacattgaaagattgatttttaatttggaaatgtacatattgaaattatagcattatatataatcttgaaaaattagaggcagcctaaatatccagcaataagagaataggtaaagatattatgatatatctacataatagaatacttcatagccatttaagattgtagtgataaggaaaaaggctaataattactgattattttctattctctagcactggggtgggacggaagtgatctaatggaattccacaagagttttaagagggttaggtcatactgtcatcaatgtttaggtgaaaattgatacctaagttaaaaatcatatgtgcatatgtaaacaactttttaataaaaatacaggctagaaataaacaaccgatggttaaattagaagaaaatgtacagacttattcttccgttttttaaaaacatgtaatcattgtattgaatatcattcttttataatccatagttaatgtgttcaagatcatgtgtagacttaaatatcaattatgagttaccttctgaaattccttttgaataggatgatttcaagaaaaaaagacataaagcagtaagcctatggtatgaatgtttgattctccttttttgtctaatcagcttcctaacataacatgttagggcacagctgctcctcccagtccccgacaaacaccaaattcaggttccatcattttaataagtgggcgttgagtcaactgagtagaagacattaagtgaaatcgctggtcttccaggacaggggaggtaaggctgttctccctggggaaccgttcagcaaaggaatgaaattttttgtgagaaacatggcctcttttacagaagttaatcagcctgttctgggcttgagaaaatactgacctccatgcctaggacctgaaagagatgaggccttgagtacatggcacatcccttcaagaaagttcatgtgctttgccttttctttcaatgcctttcctcattttttaaagacagggtaaactagatttgtgaggaaatactacgttgcagccttctgcagtcaaacgagcatgttctctgctgattgacagcaatacaaggaaaggttacatcgaagatggaggcgaacccgaatttttttcccctaccagcctagtagtttctgaactcattttgtgaaatgaaactagtagaaaaatttaacccacagaaaaatggggaaaggcaagcaataaaattaccatgaatgactaaacatgaacttaccactgtcaaaatcttctccaagttaaaaacatgactctcaatcaaatacagaatgaacgattctcacagatataactcgttcatgaggaaaccagtaagacggtaacgttggcttaaagtgcatttgcagaaccaggtatttacaggcatttagaaaagcagaataaaatttctcagttatatataatactgatcaatatcctagaacgtaataaaaccataaccattgggatgatcatttcaactagacatacatctagaatttaatctgtaacttctaatccaaggccaaagagcaaaatcagagatagatccttcttctgagagaatgaaataatccccatacaggcctctgaagggccccagtatgacaatggaagggcacagtctaccactgccaccttaccttattcataggtgttacttattcttaacatcacacagtgtttgcttctccccctcaacttttaaacacgttttaagaaatgtaatacaactttcagcttcctttattagaataatgatggtgatcaaaacacaaacaagaggttgttggcggacaccactttatccttgatctcaggccttggtccccttattccaggcactgtaggggagaaaacattttcacccattgcaaggttcatagctgagaccctcataacaaaagattaagaaaagaaaagcagatagatttatttaacgttacgtgggcgccttcataaggaaatgaagagctgaagaaacagggagaactgtgtttttaacagtcatgcagaaatatgattggaggaaagaagggtatgatcttatggttttgaactaaggagacttaacaaggcttgtttgttcaaattcttctctgtagtccctgtttcttcagagataaggatgttcctcttctctgggtatagacaaggccagaaaattctttccaggttttgtgaattgcttcagggaagaaggtgagagtggccctcttgcctgtgctgttttcacaaatgccaagatgccacagtttgggatagcatggcctgaaccccatcagcattctagactgctaaacgaacactcagtccacagctgagtgaatccatccagacataggagacagatatcttactttatcacctctaaatttgcagctcaacttttctttgcacttgtctgttgggagatgcctttcctggcgtttcagatgctgtccagtgcaattccgtccattccactgtgtaataataggaggctgtacgtcttgattggcatcagtcttaatttcttactctgtcagggacttagcatgctgatagatgcaaagtgatgcagttacttgtaattgtctcctctagcttttttgcatctgctgttaagttgagttctacagaagaagaagttcatgctgctctcaatcatttgtgggacatttggtctgttccctcttgagatggtgtttattgggccacagtttgggaattaatgtgaaaattccagtggactattcccaggattggggcttagtcttgaaagtcctaacacccaacattattttagctacacctcagggtatttctgtcttcacaaagggtattgtgaaatttaaactaataaaaattttaatttatttatgtaagtcaatctgtggcatgcaaactagggatgtggagaaggatggaaaagaggaggaagaagagtaagattacctaatcaaatcaatagccctatgcatatcccagctccgtaattgtagcaaatcactaccttcaagtcatcaaattgagtgtcatagtgaaactgttcctatatgtcaagcaaagctttaaacaaacttgatatactaataatctacaactataaaatagttcagcaattttgattcatcagggagcagtttttttttacatgccttgtccaggcccttttttcaactgaatcagccagtcaattccgttaacatggtccaaattgtctatgtaatctcagcttaccacttatttcttaatctctgttttacagttagaactccagaatgactgactaataaggtcaacctgtgatataattatgatggcttcagattgtatctctaccactcagaagaaattaactcttctaaggttgagtcagtgttttccatcattgtcatggacaattagtagccacttaacaattggttacagttcatttctgctaatggtattacagatgagatcagaccaaccacacaacagtcgatatgagttctcggagattcaatgtccacatggtactggaagccattccatttttcaggccagtttataaagccactttctgtgtattgcagtgctgtatttgccctggtgtttatgaaacatgtctttgtggcaaattaacttgctggcgacctagctgcgtaactgaattgaattgcagaacattaactttacgctaagtacacaacagtgacaagaactgtgtgttattttagagccataagaatctgctgtttttctaaaatgccatcatttgtaagcatggcgttggaagaaaagtttgtccaaattagccgtggttatagaggttctggttactaggatatgcagtccacttgtgggcaaagagctgcattgttttttttgaaactaccttgtctgtctcttcttcctcattcttattataatgaacttgggaatgtttagtaaatcaggtgacttgaaatggttgaatgttttccaaccttctcatactgaagtggtcgacaataaggcttccatagcaaccagctttttcctgacaacaatttctttggaaggggaaaaaaagcaaaagggaagtgagagctgtgtctatatgttaaatacatcggctgatttatttttaaaggtagaaaagagtgttttaagcactctgggaaaaagactgcccatcatgtgtccatccatgttagagtgtccgtcatttggtttctgaatcttcacgaggaagaatatgtccctgacatacaaaataccttagccatcgaatgaacacatatgagactgcttggtgtaatcccctcagtaggggacattgacaagaactctagtgcaaaaccttgaaggatacactgcacttgttttaattgaatatcattttctacattaattaatgtgtccattctaatttcccaaaatggcaaataatgatgtgtgaaaacagtataattacatttttatatttttggtagagtaataactggattcgatttgcttttgatcttgaaggttgtttatcattcctgtcaatcattcatcccttttaattatatttatgtcatttttggtttttatttttaatgaggcacccagatcagcactggccttgatgcgtggcccccgtgatactttgcgtagggggtttacaaagcgaagtttcttcctatgattgttaaccagatgctttgagattctctttttctgagagaagcatgcacatgtaacacacatcagcaggctactaagcagagtttgtgacttcattagaatgagcatccttgcatttgggtggaagtagtgtggtagctggcggttgtgtgcggcatcatcccacaatgtgtcatttgggtaaatgtgactgaggaccgtggcagagtcccatccgtgactgtatgtagccgtctcagtgccccggcattcggcatgttttctgcagtagctcgtgagtttacctggagctaagatgaagctaagagatgtttttaaatccacgacctgcagggggagggcagctgaggtttaacaggcatataagcttgcatatcttttgcccacatttttaactgtaacaatgagttgtcactgggaaacagcatctcagcttgggaaaaggcctgttgcctttcaacttgaaagaggttgtggtagaatttttgtttcgcaaccagaaaaagagagtgatggaggcaggcacgcagtgctccccactaggagaagctggcgttggcattcatcatcatgacaggagacgcttcgaaatgaaattctcacaaattatgaggccaacacttagaatcgggaagaaagtgatgaaaccatttgtgaaactcccttgtgaaaaaggatgcatttattttagctgattttttaaggaaaactatatttaaaaaaaaaatatccttagaatttacagtgtaacattttgccatatgtattgaacattatcatgaaagtatgtctggacacctacctcgcatccataggtattaacagctccttctacctcctcctgcctttgtactgatacccgattttgcaaaaacaaacaagtagcctcatgttgacctgcatttatttgaagcgcattatgcaccaatgcagaggaaatgcatttacttctacctctgaacaactaaagcttaaataatgcatttcagcaaggtaatctattagaagagctctcttgagaagtgctatgttatgaatggattctgcatttaaaatatccattttgttgcctccctcctgctaattacttctttctttgtcttacctctaatttgcattacttgagaagaacagagggaagggagtccgtcgttttccccttcacgaatccttacacttagtggcaactgtagtgttgacttaagctcatttctgtagaagggaaactgcattgccaaggaaaagataatcgctaatcactaaatctaattacaaagaagagtaaatcactaaaaacaaattaagtatcttaaataaaaatggaaaataaaagcagttaagaatcaaggaaactgctgcaatctctcaagtctgttgcacggagctaactgagagcagcctgtgttgggttgtatggccagactgggcatgggcaaagcttttctccatggaatccctcttcaaagagtttgaccgaaatgacaaaaccaaaccaaacaaaaaccttggctcagaagcaattctgagtatcttttggttgtaacttaggaagcaacaagtcactctctctgtgtagccctgcagacctgcttacttgtcctctatctaccaggatgatggaggttactttcaaatcactgtagcccgaatttaaatgaactggaaactaatgagaattctatacttgaccttaatctgacgaggtctgacagaagcttctttctaacccactcctcctcctcctttccttccttcctttctatattactagttccttatgtctttaaatgtatgccagtctaatgggagttaaaaacaataggaaacgaagagtttttatccctgattcagaaaatgtggctggaggagtagtgctcttcctcacaaaattctcctgatcatgttttccctgggcaatttccaaatctttttttagttaatgcaatttagtgatgtatagtatttcccataagtatcccaacaaaagtagagctgcccatcacatttgttttcctggtatgtttgtagtaaaaaattaagataacataggagaggtatttcattgaaccattaacgttaaaaacttgcctttaaaaatatttatatgtctttcctttgcgtagttattcataaaatgtttccatttgcttttcaagcactttgtccagtcttcttaggtatgaagaaaagtcagaagattgaaaagtaaatttctgagttgggaggatttaggagaagagatatgcatgagagatggaaatgcagtctgggaaaataaaatacccaatgataggacctttcgatgctatctctgcctcgagccacttgggttataataaggttgtggtctaccctgactctgggaccagggaattgagtgctccggttcaatagtgggtagcttggcaccatcactaactatctttgaccttatacttctgaaaaccaagtttttgtctctattctttgtcaccaagtgcccatgtatagcatattctgttcttgcctttttggttttaggatcctcctgggtacctgggtttctacggggttttcctcacactgtactcaacctggtagggacatccccaaatggtggatggtggatctctctggtcaaccaacctttgtcaccatcatcacccccgatcagggacttcccagatgggctggagctggatctctcctccaggtctggccttctggggtttaacccatgcggccactgaccacatgacacctcatgcatggagtcagggagcactggatgccaccctgcagggactgtgttccagtcaaagccacactaacagtgagcactcaccacaggctgtgaggcctcatcactgaaccagggctgtccctgggtactcaccagaaaagcaaattcaggatgatgtgagaaagaaagtcacgtggctagtgaaggttgagcatgttgtgtgtgtgaaggatgaggtgtgtttcgtatgcccatattttggattggatggaccaagtgaaggacagtcttaggacggggacaaagagtctgaggagtgggacgttctgtgctgtgagcagcgacgggcacccagcagccctcgccttgtcttcctgcgaaggttcaggagccagtgtgttctttcctctggttcagcagagagcagtagaccctgtctccaagccgtggcaagtgtctaattctccctcctgcttagctccatttgcccttaggtcaggcacattgacgtgagctcaaacccccatgtactgcagagggataacagttcttcagccttgaaaaaggaatcacagaggaaagggcagttagggaagaaatgagggaaaaaatggatgaggaagagggcccaaaaagagataacagacactgaaatcatcacatattcctttagaaaggcacagtgagcacgctcattttttttccattttagacaaataatgcatgataagtataaatgtgtcatgagcacactgttttctctgtagaaataacaaaggccctggatacagtagaatgtctggccttacttttctgtaaactgcggccactttgtcctttatctgtgtggttaatttctatgaactgctggacagctgatttgaccgaggcttcttggctctgcaccgggtgataattctacctgggcagcaggccacgcgtgagagcagcttccccgaacctctctcatcccctcagtttgggcacagtccagcaggagaatatttaaaactgggtttggtttaaaatgcagataacagacagaaatgcagataagctttgccataagaaacgcacagatgacttcagataaaagtttcgccagagaatgaattaggaccgtcgtcctgggggccatgagacaaccctttgccccacacagcgtcccatctttcaggaccagcaaaatacgtgaatcagttggaaggaactatttgaaaaaccaagggatacatgaaatgtgattttatgaggaaacgaatgtactcttagaatacctacacctttttttaataccactgtgttgcatgggctgttctgctcttcagtaaaaatgattaatagcccccatccatcacattgtacagtgtggtacatctgagtagcagagagcttataacatatacttggcaataagtcacaaaaacattcgtattttttaataacatttttgaaggagaaaaatctgtttttcaataaattctggcgtggtttccctccagattttatttctcatttaaaatgaccttggggtcgattcttttcttcttctgttcgttggctctttacgaggtctttgccttaaacagatacattttagagatggattaaaaaggggactagctcatgagcatagaattcccgatttccttctgtttccacttctgatgagttgtggcagcattaacaccaatgtaacttaattttacagaaatttttgtagtcggtgctactcataatcaggtaaaattattcttcaacacatttctttgttaccgtaatatatttggcttttctttgtggactattttatttctatacattattgtgtaaattgcagaatctttcttgtaaagtggtaggttgccactatttttattggtaaaactctgaatttattatacattacatagttacccctattattggaaactccttgtttctacattaaaacaacaacaacaacaacaaaaaaaaaaaaaaacagaaaaaacagcttaagctgggcgtggtggctcatgcccataatcccagcactttgggaggctcagatgggcagatcacctgaggtcaggcgtttgagatcagcctagccaacatggcgaaaccccgtccctactaaaaaatacaaaaaatagccgggcatggtggtgggctcctctgaaattccagttgcccaggaggctgaggcagaagaatcacttggacccaggaggcagaggttgcagtgagcgtagatggcgccactgcactccagcctgggtgacagagcgagactctgtctcaaaataaataaataaataaaataaataaataaataaataaagtttataattcatagtcacccaaggccaacaagttgatgatgtggaatgtcagctaagggtgatgctaattgtagaaaatcctcttggcccttttccattcctaggaattccacatactttttaatttttaaatttttactccagtagtttttggggtacaggttgttttggttacatggataagtccttaacatgcgttattcataggtgagaggacaccttcattcaggaccacatgtgagttcctaataaatatgaatggaactcactttcatttcctagagggtataccctctaggaaatgaaaagggaactttcagaagtctgtgaaattcattcttatatttgaaaaagatgatactcaacccatctgacacgcttcataccaatccccaccattcaaacattaagtccatgaatgaaataatgtgcagggtttttcctatccacaaagagttcccgtagcattttataatgtgagatgtttttaaagcacagaacaatgtttaacattgcaagcccaatgaacaggtaccttggagataggaaaagcaaagtaactctctttctgtgtttgttgtcaagggaggtctcccataccagctctctgattttcttctcttctgtgaattggaaggttgcattcaatgaaacaaaatccgcattaggatgcagatggcagcacgttgaaacaccaggcaaagaggtgtttattccactaaacacctttggggctgtctagttagattttgagacttgactgtttctaaaatgctttgtttctgaatcctgtttcttttatgggtgtttgagagagatttagaaggggaaatcaataggatattatgatggattggatatggagggtgagagatgatggtataaatgatgactcttggatttcttactggtgtacttgaatgaatggtggtgttagagagctagttcgctgaaagggatcaggtttggagggaatgatcagcaacttgaggcttccgatatgtggggtgaattacaatacttctgagacatccaaatggaaataccaaatagaaaataggatgtacagatcggtatgtcataagaaaggtcttggttgaacatgtaaatggtgactgtatataggtgtaatttcagccatgggtgtgaatgagattgcttaatgattcctgagctaggtagaggaagatgagactgtgaagaagttagagagggctagctctcaagacatagagcaccaggagagtgttaatgtcaaagaacccaagacatgagagggtttcaaggtcagagaaattgacaacctgggtagtatcataaatgactttgtccactaattcaggtacagtcagatattggcaacatcatgatctaaaacttctttgtagaaaattagctgtgctttccacacagcaaggatccacccttaataactggctgactggtaggtttttaccactgtagcacaacggaaacacttgtaacctctgcataccaagcatcatttctcccttgcctggaataattttcctttaatatcatcctgtgggaaatgtatctagtttactgctccattctttgtatcttatatggaattataatgatctgtacttttgttgacaatttcaataatgacaggaaaatatcattattgttgaggtatcctggtttaaagcaatttcctgggagaaagcatcaaactcccataataaagttatagtccaaattgtaaaaatgtgtttttaagggtgtttttttctttcatatagaagcatcatgggcctttactgaactaattgtcatggtagagctcttgataagccactgtggttgattagtataatagtgtccctgtcaattttacttaccacattgaagttgcatagtttctgaatttgacattcttagaccagactgtaatccagtgaatccattacctaagcaaaaataaattcacagaagtagcaatagcttttacttaagccttccttccagtccatggcaaaaataggacttcagtggatttcaagatacttgcccgactgtgctaattctaaagtaatcaattaaaagagaaaggcattagctggttcttctttgtataagaaacaaatttaaacatctaagcaattctcagttcataaggtaactttacttttcctatataaacagtttctgctatagctgaagatagaacaaatgcatatgctattgaatcttttagcaagttacatggctctaaaattggacttcttttcaggcatcgcaagcagaccattgtctgtagctttcatggagatgtgtgtgatttgtccttgaaactcggggccctgttctcctcccactaccaagttcagccatgctggtggcttcagacagcgtccttggaactcttgacttttacatccttatctcaagccctgcttttttcttgaatgccagtaattttggattggaaatctcttcctaggcaaccaaattcaatgtaaaatggagctcatttccccctttctttctccatggaagtcttataaaactcaaccaagcatgccttggaatcatgcctcactcctttttctctctcattccccacagctcatgaaaccctcagccctgtcagttttttctttctcaatttaaaaattttcctttcttttcatcgtttatggacagaccacttctcccttgcacagttggaacaacctcttcagccaccttctacctctacacaaaagttactgatgtttctaaaacctgagtctcatcttgttactccctattcagaattctccagtgcctctcctttgcctaatggttaatgcatcaacttctcagcaagtcctaagggtgcctcacaatgcggctgcaatctcccttttccaacctcttgttgagtgacttctgtacattcttcaccccagctagtcacccatttatcagaattcgaaaaaaatccacgctttgccagagccaaccccacaccatgcttacatctttcaagattaaacttgaaagagcttctgttcgtcattcaagattcaactcagatgtaatttttgctccgatgctttcttgtacattatggattttttttttttttgctttttttattcccataacattatagaagcttttattttcacttacatttttattaacattttacaagaggctgcatggcctagtgctctttttaaaaagcctaggcttctgaatcggataaacctgtgtttgtagcctgattttttttttttttttttttactgtgaactctgaaaccaggttatttgacttctctgaacctcaatgttctcatatgcaaaggggggaattagaacagtacctttctcagaaggtcgtcatgattatctgagataaaccacacgcaactctcgacacatgaaattaaacattgtacctggctcatgtttgatttgttgttgcaggggtggtattggttatatttgtccttccctcaagattgagttctgattactggttcgtagtagaagtccagtaaatactgaataaatacctaacaagtgggtgaattcgtatatagatgtagttaggtagcccaaaagattaaagtagaaactcttctgagacatgatactgttactgggatgggaaggctaaaattattgcatattttaaaatctggaagggtagaatttactgactcctaaatttaccctttcctgaaatgggagaaatgcaggtaataatatttatggtcagttctgtttttattcagcaaagcatgaaaactatttatttaaagaaatagactgacactacccttttgctcttagtatttggtctccagcattaatctgatgatcactgatattgactgctgttcctattaaaccatgtttaatataccataaatcatgtcaaattgtacaagtctatatatttggaggaaggtaatttttaaagaatgttagcctgatgtatttatttgcattctgatttatttacttgcattttttatgtcctagaatctattataatcctctatcaggtgatcaaactttatgagattttaaaaataatagtttcgacttccagcaaatgacatacaaaatactctgatgaaattgaccttatgaacctaagtatttcccagggttcctggaccctaagaaatacccttgagcaaaccacagtggcttacacctgtgatcctaacactttggaaggccaaggcaggagaatcacatgaggccaggagctcaagaccagcctgggcaataccttgtccctacaaaaaatacaaaaattagccaggtgtgtggtgtgtgcctatagacccagctaccagggaggctgaggtgggaggatggattgcgcccaggaggccgatactgccctaagacgtgattgtgccactgcactccagtctaggtgacagaatgagaccttgtctccaaaaaacaaaataacatactcttgaactaagaaaaatgttcactaaatgcactaaggtaaaacattattgaaaacaagatacaattcattttctaataatgctctttggagttgataagaataggaatcatctgggaaaacaatgacatgttcagagcctcagtatcaacgcttgtaggtagtatgtagtttggctccatatagcatgtggcaggcagaggtgacctcttgagtgtgaaaactgagctgcaggggcagctgccaattacagttgtgtaatcaccttctctgaagctggtccactgtcacagaatgaagaccctggttcagctgcgatgtagtttggccaagcatctttttttccaaccctgtgatttcctgatgagcaaaactgaaacagtgattcaaaacataccggttgggttatccgatgggaaataaaactctaagtccagattagacagtacctcatgatttttcactaaacgaaaaacaaatatagtcgtgcttttttaccacctgcagtcctaattgaaagtaatgattctggagccagcctggctgggtttgaatctacctcacttcctggttgtgtggctttgaattcatcagtttgcttcctgtgctttaaattcatcagtttgtttagtttcctcatccgtagaatggaataattaagttacctatcccaaagtggtgttacggagaccaagggaggttttgtttgtaaaatcatagaacagatcctgaagcagaataagacatacccactgctcttgctcttacccttccagaagagttggccatgacttgattatctccaagacaacagtgactcctagatgtgtcttcagcccctgccttttgtgacatcatttgcattttttcaattgcccaccagaggtggccactgggttttcattttgggttgcgtatacctaacctaattccttctctgattcccccagctcaatgtaaatgttctcctcatcttgtgttctcttagccaggtcattctgcagctgtgtgctctagcaccctggctgctcctcagacaccttcacacatctctgctctgggatcctgtgctctttcccgctgcatgtccacagagcttgcaggctcccccacctgatagagattctgctccagtctccactactccctggaatacgataccccagtcacactccacctcatacccttctttagatttcttcatagcacttactatctggcattatatagtgtctggttcacttagagattctttgtaatgagaacaaaaaatcaaagctatgcaggtattcacttggctcttttgatagaatgtggttactgggtaccagggcttcatattgcagagaaatgatgaaaagtttttatgattttcacatggcctcattatcagatatgtcttgatcatttttggaaggtattacccactttacagacaagcttaaggcagaaaacatccaaacccagaacttggtcatcttggcacttttattttattttactttattttatttatttatttatttatttatttatttatttatttatttatttatttatttttgagatggagtcttgctctgtcacgtaggctgaacagtgcagtggcatgatctctgttcactgcagcctccgcctcccaggttcaagccattctcctgcctcagcctcccaagtagctgggattacaggcatgcaccaccgtgcccggctaattgttctatttttagtagagacaaggttttgccatgttggccaggctggtcttgaactcctgacctcaagtgatctgccctcctcagcctcccaaagggctgggattataggcgtgagccactgcgcccagcccatcttgacacttttaatattagtcttgaaacaggaacaatatgttcatttctgtagaactacgaaatggggacaaggacccagcaccctccagggtggaattccctgagcatttgaagtagatattttaagcaaggatgaaaaattaacataaagagaacaatgaatactctatgaagtaaacagtcatcatttgtacttgtggtctttacggaaggagctaacacctgaggagggaaagggcattgcagttgtggttctgtttacacacccagcatgggattctgagtggtgtagtccttggggacaatgacgcttcagtgtgcaggctacttctcagctcagacttactatctaaacctctctgcagaaaggctgctggggcacctcctgtgcctgcaggggagagctccagtgcttcccttccctgccttgttatcccctgctggtgcccagcagattgcagagggagcccagcccttccagacatcccacttgaactgggcttaaagcaaaaacaaagaagtaagacttaacatgttttgtactaagggagctgcgtggataccggtttcctcagcggctcaggaggctgcctacctagctgtccccacccagcaataagtgattggcggcagaagcaaggcggccaactcaggtgtccctgaggcctggtgagcagtgctggttttgggaagggggctggggggctgtggcaaaccagcagcacctgcctctcctaggggggcagctccaggctaaactggcctgtgggccccaaattcttcagagaactggattccagatgtgtgtgttgatgtggacaccacacacttgtgagcttctgggaaggaatcctctcatccaccaatagccacctccatgttttggagtgcggtctgtagagtttggccgcttagatgctaccctacagaagactggaggaatggcaacattgtccacaggaggattagttgtagtttgaattcacacttactgcagtcccaagtatttgacaaatacttggggattgaatactatgctatattttaaccaaacatatttctagaagttaagatacctcacttccattttaaagtcttttactctaatgtttggcttctgaacccttaatccggtccatgtgtcacttctgaaaagaagcagtcaagccaggtctccccttgttccttctctcattcctggatcctttctctcattcccccttttgcttcctctcattcttcctttcccctttcctcttctccctcctccctcttcttccccctcctccctcctctgccccctatttctccccatcccttctaccatctcctcccttctcccatctcctcccttctcccatctcctcccttctcccattctctttccttcctgtcccccatcccgtctccttgctctctcttacccttctttcatcccctccccacactccccactccccactccctccctctccccactccttactccctccctctcctcactgtctacctctccccactccctccctctccccactcccttcctctccccactccctccctctccccactccttgccttctgtagatgtgcagtgctgattggcagaattctccccctcaggccatgcagggatgctctcattttgttttccccacagcccctactccctgctcattcccttcacaggttaccattaggatgtgtcaaccctttgtttaggtgtgtgtgtatcctggaaaattagatacttgcatgaattagttttataatctacatgaatgggattgtggattctggttcactgtttttttgtttgttttttcagcctgtactgtcttcagaactgcctgttttgctaggtgtgcatcttactccttgcttctgactgctgcgtgggtcctataacatagatcacccacatgttatctgttccttcccctggtaatagcactctcagcggcctcccagtcccagatacttcccatagtgctgcagtgaatgcacatatccccttagggcttggcgggagggttcatctggttctgttctgaggctgcagggcgcaagcacacttaacttcatcaagtgtgggagatcctttctgggatgactggacccattcatactcccaggatctgtgaatgaagtttcctgtttccccacgtctccacttggtgttgactttctcattctaatctgatagctgtatcattgtcattttcatttacgtttctctgattactggtgagattgagcttttctttataaacttcttagccatttggatccatttcccttctctcaattacctgttcacatcgtatgcacatttttccattgggtttcttgtcttttttgttaatctcttctatagtctggatattaatcctctgttcactgttaggtgtggcacacatcttccagttttgtctactgtgtcctttgtaggcagatctgtcagtgtgtactcctggatgacttaaatcatatttaagaaattcttcctcatcccaagctatcaaggatattttctccagcagttaattctgttagctgcattaggtatatctcatatgtagatgtttacggccctcagaagggagggatttttgtgtttctgttgctcctgtggcagtaagttacggatccagcattttctctcaatagtaagctggtttttatggtaccatatcctaagtattccatctgttttcctgtaatgtgtgttgctacctttatatgtaacaagttgccacatatccatgaatctgttttaggaccctaattttgtttctggaatagcaaacagacttgggcatcatgggtaaaggcctccaagaaagcagtgatgcaaggactcactggagcctcaagtacatggtgaatggacttgagtttctatctagaattcgaaagctgcaagaaagagcctttaaatcatgcctgccccatgttgtcattttcacacgaagaatctgaaagttaaagagagatcacagtgccggtagtcacataccaaagacagacataggactgtggcccaggtttcctctgacacagctaggcactctctgaattcattaccctgggctgcttctttcctttcacaggttagagcaggtgattttttcagtctctctacccctcacaatctattcctgcctatgaaagttttgtgagtttctccttacttctctttaaccttgttgaggaagcaacgcttgtgctctgcaggccggttatttaactcctgcatgcacatggtttatgttttcccttcctctctccccgccccctgactttgtagcaaaaggaaatttattggcagcagtttagtcagtgggtgggagtcgaggcaggtgagagagcagtctgacaggagtggactcatgatgtttcgtattttaatctgtgtctcaaaaaatgaacctgggctggaagcggtggctcatgcttgtaatcccagcactttgagaggctgaggcaggaggatggcttgagctcgggagtttgagaccagcttgggcaacatagcaagacctcattgctactaaaaatttttaaaaattagttgggcatggtggcatgctcctgtagtcccagctacttggggaggggagagcagctgctgaggcaggaggatcacttgagcctgagaggtcaaggctgcatggaaccctgaacgtcctaccgcactccagcatgggcgacagagcaagaccatgtcttaaaaaaaaaaatctgctttttgttcttttctagctacattacatctttagatgtattactagagtgtgattttctgtgtgagtattcatccccgtcattgagtggaacagaaaaaatgtgaaacgatgaagttttaggaagccatctaacgcttagtacttcttttcccatctcctactacctaagtcgggacaaagcttctgcttatttttctgcttcgtctaaacactgctagattgatgaaatacactaatgcatggagtagaaacagaggggctttaatggaggtcatgtccctaagcagagcatcagagaggagaagagaggaggaggcctgggtggcattttgtttgctgtttggtgagtggggagatggcagtgagacagccagtgtgacgttgagagtgttctcatgggtcgttggcattctcagcagtgcatcaacaaaggcccctttcttctggaattccagagtacagtgtgcccacgggaggcctcatccgggggcagtttctgcttgtcaaggaactgcaaccctgaccttaaccaccacctcatttcatgcccgagagcttggaagcctagacccccactaacaaggagcaaggcccttggaaacgcagcactgcaatgagcattttattgaattctttcaaaactggaattacagaacgtccagcaaggcccttttgggagaagggttataaggttggaagataatcagctcagcctctcccactctgagtaccattcggttaggatgtactctccacccttttccatcctgctacctgcctctgaagtgggagctgtcatttggaagtgatttgaaatacttggatgagataataatatgtggcatttattaatggagtgcttttttactcaggggctcagactttctgggccttctaatgtgttaatctacatcttcttcccactgcatggttttacttacttttaaaaacttctgtgattaaaataggcaaatcgaccaaacaaaactgttgaacaacttccctgttcactaggttaggtcatctagtgatatttaaaagtaaagtagcttcatagagtggattctgttgcgaggcctttgttactgataagtgtttgtcagttgtagttaaaaatgattcataagaaaaagcttagtttttctttgatctgcattcaataaaatgtgtctcatagactgagaaatttttcttcctcccaacatagcccaccagttctagaggaaggctattgtcagtcacaaagaggatttatgtttctttttttttccctaatgggtaactgttgttgcttatggattggagaggattctaaatgcttgtctgtctgatatgaaggcagtctctcttttcacataggcaacgtgccctatgtcgtacaggttagagatgaaatacgattgaaatcatgtggatgcatcttcctgtgctatgtctttcctacaggcagagtgccccaagttcacgttggatacgccgaaactcagcgtgtttccacaggcaatttaagaacaaatcaatacctcagacagtaatacgtcttagaaagagatttctcatataagcaatggaagttttatcttttgaatttggttgacttataataatcaaatgtttggaggaggagagacctattcttttgacagtcagtgcaacctgtatgctcggcctggtttttgtaaggaaaacaggctacatatgtgatggataactcagagtagcttttaaaatctacttactggcttatttctggtctccagttttggctttcaaggagacctcttagatatttgtacctttacatatacatggaatagtacagcagaactttctcaatggcctgtgtctaggcagaccctgagctgatgctcttgcatgtgccacattttactgggtgcgaatgtctttcaacaaagtcctgctttataggctcttgcatattattcttcatctccaccttgggaataatgagctttttcctttctttgagatgtatctcaggaggtagaaagcaccatcaagatcgcattcgctagggacacatgaagaatttgagatgatgtgttatgcagtacgggaaagggagtcagaaactgcaggagttagagaaagacgaggacatgttgacattcctagtgacgtatatgtacacacatacacagtacacacgtgtgtgtcacctctcattacacatgcacattcacatgagagggactagaaccgttggccaggctcggagtggtgcttcagctttccaactggttaccagttgttttctgatagcaaaggaagaagtagatgtggtggatagcgaaagatgtcttgatgtttaggagaagaaattcaagtggcaataaaatgtaaacaacgatatttatgggaaaagcaatagtaatgatcaattttaatgcaagcatctgtgagaccagaagttggggcaacacaaatgatttatagacaaaggtatggcaagtgcaaactaatttgtgaagggagctatctttgaaacggaaccatgagtaaacgcagtgcatttccacatgcgtagcccatatccgaagcttgtgtcctgactgagtcatgagtaaacgcattgcatttccacatgcgtagcccatgtctgaagcttgtgtcctgactgagtcatgagtaaacacagtgcatttccacatgcgtagcctatatctgaagcttgtgtcctgactgagtcgtgagtaaacgcaatgcatttccacacgtgtagcccatatccgaagcttgtgtcctgacttcagaaacactgggtcttactaccagtattgggaaagccaatgaacagggaaacacaatttttagttactgagtgaatcaatatcttcttactttaaaatatagatggctttcacttgcattctaacctggatagtgattcttgccaaggtaatatataagcactttgtcatgtttccaaaaggaaaatcaagattgtgttttattcactgttaaattggcatttttaggtgttttaaattcaccgaggatagcatcatcagcatcatcattgctattaatgtaattattaccaccactagatggtgcatggggaattgggggcaccgaatgttataggaggcgttctcctctatgctatcactaattggttgttaagggaatatagaaacatatcagagggtggaggaaaagggacgataaaatatgatggacttttctcactaattaaagctatgctggagatacagtggtggaaataggtctggctggagagaaggtcttctatgtttgcccctttaaatatacgtgggatactaaaatagaattttataaatgctctgtatcagaagcaagtattccttaaattggagaaggcctctggtgttctggtggggctaggttcttgagaatcccttattaaatacgacagtccacctcgacctgggttcccagcgggtctgcctgtatggatttgcatgagctggggtcctgcctagtctcctctgtgcagccagcctaggaacacaagaaacaaaagcaaggttcttgatttgacaggtgtcattttcgaggaccatcacatcttgattttttctttcttctgttcattttgatagacttcagggagcctctgctgtcagaaaatgtgctggctcctggcttcatatatgatttgtgtctagcttcctgtagactaaaaatatcagcagaaggaattatagatggttcaattaaagtagtaattgggcaaaaacggctcataacaaatccaattctgggaaatgcttctgtgctttgattattatgttcctccctatttctccctctgcttacttttttaaagtttgatataatagctcatttgagggtttcctagttcttgttggtctctctcattttaatacctagcaaagggccaggtgctcagaacatgctgagagtaaaaacaatgaaatgagtaatgatcaaaaagactttaagaaatgttttgaacatagaaataataatttcttaatatccacaagcataataggtcaatagtatttatgtaaaatgccagtacacaacaaatgtgaaggagtattaatgaatgaaactgctgtagcagtaaatacataacatatcaaagaaaatgtgacagttctagatgctgtgtcatatctttttataacaccaaataaggatttgtcacaagccacttaatgactctttaaaagttgctaatgttcttacttacactctcgtcgagtcataaatcaaaaaaggacttgaaattaagacccatggttggaatatcaatgcagtcaaatatctgttctttgtatgaggttgagtgagtggatgatgatggtgaatttgagaatgaaagggttctaataagtgattgttgagtggcaatgggttggccacagcactttagttcttttgacttgagaaattgaaatgtatcctaacatattaaacttcacaaagatgtttatactctgaaaagatcaatacctctttttctacacccactacagaagatgcgatcatttattatacgattttgagttctgatcaaccaaaacatacaactaaaacatcacaattgtgttttcttttttaaaggtcatcaattcagtagatagctgattttctgtatgtaattctgtccctttagtatccccactggcttcccaacatgtagtatatgtaccttctggcacacagtagggcctcaataaacatttttgcaaggatgaattcaaattgaatttgaagaataaataccggaagaataaaattggccccacataaatgtgtggggatctacttgttgcaaatggtccaggatgcagattaatatgcagtaggcacgtgaatatctggaggtcagcaaggtacagtagtgagatgtacacatctacacaaattgattttttcaacttcgtttgattggtaacactgattcaaatgtagtcataagactcacagtaatagcttaagagataaaaagggatgtgtgttttcactagcattttatatctggcccagcagctgcaaagaacctgatgctacaggcgtttaacatacttttcttggattgttgaaaaggggaaaggaagaacaggggtcattaggaattcttgccctttcttgtagggaaaagaaagggcttgcttgtagtaggagggagttgtatttgtgagtcatagggatccattatccatatctgctgaagggctgtcagatatgaagtaaatttagagacctacttgtccctttagctattcatcactgttgattggcgccagtggcaggcagcagtatttttagagaagcgaatgatatggaatttcttcaagtacagaacattggctgatcccattactcaaagctactcaaaaagtcacagctgacacttgacagaactacagaggaaaaacaatagacctaagaagcaaaatactgaaatgcatgatgaaaacatagggagattcaagttactcatcaccactgctaatccagtttggtgctgctggttgtcagtggtattaaaaatataattttcacaggaatcgattttatgcatgtctctttgccctatcatagagtgaaaaataggctgatttttcacatcttgtaccaccttcctttgtaatatatctgacatttatgctttgacaattggtatgtgaagaagacacatgaaggacctttttccctgtagcagccagcatggtgctgtatcttggtttccaaatgataaatgcaggaaaatagcaaacagttttaaaaatggccttaatcctgtgggacagtattcgtaatttctcgataaaatccttttaatttaatactctaaattaatgttttgaattgcttctctgcaagaatgctagatcgtagaaatgtacaaaccatccttcagaagagtaaaagactaagccatctacagttgtaactgtcagtgaatggccaagacttaactgcagtggagccttttcagcagtctgttattagacttaatttttaaaacctaatcaccagagatgcctgagtctgttgacttagtttgacaagaaatctgtgcatgtttacaaacttaacatggtcaagaagcctgtgcatgttcacacacttacatgtaggagaagtctgtgtgttcactaatttacacgtatgagaagtgagcatgtgttcactaacatacatgtgaggcctggagtctaaccagaaactgatcagcaaggcttcaggtctcaggtcttgagcgctagtgccacagctgggtgtgctgataacttggcaaaatcagttggtggttttcgagctgtggagagaagagtgcctggtgagttcagcgaagttggttggatgtccagtggtggtcccttcacttgttaaattcagtgaagaaagagaccctgtgctccttttgatgacatggccaagaaaattatcagaatttgtcaaaagaaactttgaacaaaggtattaggtagcgtctattaaaaattcatcagtaagttgtttatgtcagtcggagaagtacactgaacatcatagtagaataatttattcattcgttaaccaacacttacacaacacctaaactatggtagatactattttgaacggcttacagatactattatatttaatccacatgacagtcatatgatttaagtggtatgatcaccctctttttagcgataaggaaacttgggcacagttaagtcatgtgcccaggatcacacagctggtaatggcagaactttcacgtgaacctgagcggtctggcttcagaatccacactcaagccactatgctgtgctgcttctgagtaatacaaggcaatgatttgtaaatcacagtgacaaccagtgataacctattttattcctttatatcatcccgctctactcacatcttttaggctcattaaaggatttagttgaatgccaaatgtgtggacttagaagaactggctttgaattccgacatttactggctgtgtggctttggaatagtcacctttctgagttgctttcttcattcaacgggtgtaacaatataaatcctgctgatttcacaaaagtcaaaatgttttgccctgtagaaattggttaggtatcattcgaaaaagccagtggctctccaggaatgaagatgctcaaggaggccttgctgtctacctgtgctaccagctttcctgtgctctgcagcagctctagaggccactcctttagacctaggtccatcttgaggtgttgttatacagcctcttaggggtttttatgtctgactccataatatttatgataaaaacaaaaaccacgtgtgtgatggtatcatgacatgaatatgatccttgctgacattaaaatggagcagtggtctccattccaggtgatgaatgacaaaatcacccaagtatttttaaaatgtgtgactctccagagagggtacccttgagtggctcttccactgaccccggaacttccaaagcatcaggcttgggtcaaataggattcatctgagcttctggttctgatcttgtaaaagctaactcatgcatgcacaacatgataggccatgtcactcctcacagcctttttctgcgctatccttttatacattttttataaggcagaatgctttgaatgcattctgcctcaaaaggcattttgctctaatggctgtgtggaaatgttcattctctgcttctatgtttttaaaaaacaaaagggtaatcagaagcatttaattgtcttagatgctcaacaaatagtaattaaaagctattttttttttagttttgcagaagtataagcatgcctgtgaattaaataaggccatgtgtcaagactgatttgcacagtgaaggtaatatattttagtagcgccaactgagggctcattgcccaattgcatgataagcaaaccccatttgaatgggtgtttattcttcatcctggttctcggtagtctgaacccaaggcttggtgtactgttttcaataggtcacctccacttgatctttgttttcctcttaagtggcatgctgaaaaaccacattcatctatggggagtctttttgtgttgcccaggctggtcttgaactcctggcctcaagtgatcctcaggcctcagcctcccaaagtgctgggattacaagtgtgagcccccatgtgccttgcccccaaagctttgagtaacaatgctcaaagatacgtcacttctgttaaaagattagtatattcagtaagtagttcctaatgtctccattttgtagagagaagaactgaggcatggtgacttcagatttttgcgtaaggtcatagctagtcagtagaaaagctgaagttactgactttggggttcttggccttggattttcctcaccagttcaacagcttcttatttgtatgttgaagagaaatgttaaagcaaataaatgtcttagctcatcctgtacaaggatgagaaaatcaaaagcctgtagtgttattttacagctcaggagtcacttctcttgtccttgaatcatttgagcaggagacaaggaggtcagcaacccccagttctattttggtcctgaccgatgactgcttgtatgacctttcgcaagtcacttaactcctgtgtcactctctgtgaaatgaggatggaggagccctgctcccctgccagtctccgatggtgacttcatcaggaaaggtgagccagagatgctcagacagaatggcctgcttatggcactttctcaagccgccatccagttgaccagctacatgaacaaggctgaaactagatcaggactgatgagtcttcaccaagaagatgcaccagaaaagcagtgccaccatgtcaccttctgtgtccctgtagtaacgaaggcaggagggtctgaaggcacattttttttccccttaaactttagacttcttgcataaacttgagcatatttaagagagcttgataaaatagagcaataaattcagttgttgaaattcagtagataggcgtcctgaaagtcagatgttactttggtaacaatcctgtgtcctaaggacagtagatgtccactatccaatacctccgaagaagctggggagtgccctgggattcaggatagcagacctcatttctttcatagcactttaaacaagattttaaacagaaaaataatgtcttatagcaatcagatttatggttttctctagcataggcttacccattaataacttatttaatcaattccagaataaatgtgtcattcagaaatgtcatgtttgtactataaatctttagttcctttttaccaacaaattaactatttttaatatttaaactttcataaattattttaaaaatcaaaaaccctaggaaaaaaatgagtgagggatacaaacatacaaatagacttttcacagagaaagaaatacaagtcgtaaatgtacacatgaaaaagcctttatcctcctccccctataatgatcaagggagtggaataccacagtgatcaagaggatgcatatatctggattcaaatcctaagggcactgtttatttgcctggctgcttgattccgcctccccccccccggcccccgcttttttgtttattgacatattatttgcatataatagaattcatcgtttcataggtacactttgaattttgataatcacatataattgtgcaacttccgccacaacccatttagttatttgtttatgcttccgtttcccagctgttaattttcctgacataagcagaatttggtcctatcactgctaattctccaggtgaaaggagaggttcatttgagtcagcaagcatcctttgagcatgtcgtgtgtgtcaagcaccttcgccaggtgtcaggggatactgtcttcagagttcatatactataaggataggcatttgctcacagatgtatgcatatttagctcttaatttacacatcggtgcagaaaaggagaccctacttaatagtcccaaggagcaaatattccccaaatagttagtagcaagtagcaaaactgtgccattccctgtgctccttccccctagaagcaaacagaaaagctttgctgggttttgctccttagtttttaatgttctaacaggtttgcatttcacctgtttctatgattgttgaataacagaaaatgaaccaagagagcataagatttcaagcttgcttcttgttatttagagacatgccaacaacccacaccatctatgcagttgaaatttctgcatctccaaagaccctttcccctccccaccagaagtaccagctgccactcagggagagcactcttgcccttcagaaatcccaaggagaatctaggacaactgcattcaactgtgaaaccctgaaagagcctttgctgttacctttgctgcatctagggagtgcttaatttctcctccagcttccccacccctcaccagcccttgcaacccatccatgctgtggctggtttgggcccttgatttcatagattactacctgaaagcagaaaaggaccatagtgagacttacggcagcactacagttagcgctgaggctcttacaaatactttgtgagtgctcctgcctgaagcttggagtccttgaagtgcagaattactgcaggtgcagcagctcaaatcaacagcttttaagcgcgtccatttgcagacgtgccaagagcttgcaaggaggtgtgtagcctgtaaatgagctcagtgtctacagtttccattatttagaccccaaggcatgttcctgtcgtggacagaaatcaccaccttagacccatatcttgcccgagaagtttataagtctacacaattggacttttcaactacatactattttgcaaattcagaaataataaaattcccaccaatttccaggcatagaaaaccaatttcttccttgatgggtccaattacatggttgatacaaaattttaagacctatcttagtgttttcagaggctagccagtctctgtgggcttgtgaataaatagcacacataagatgctggagtctttgtaggtctggactgtttgcttgaaagaaattaggcaaattcttctgatgccaaaccattaagcagcattttctgttttgcagtaccctttgtttttgccttcattcctctctccctctgtccttgctgtccctcccttctttcttctttggtttcttctcatcttcccttaacaattatttgaggccctactatgtggttggtaccatgttgtgctggggatacagtgatgaacagaaacaaatggttcatgcacttcaggtgctcctggtcaaatagcgacgcagacgttagtgaaacacaaaaataaatataagttaatattctggttagtgcaatgaagtaagcttgcctagtgctaagaggctagtattttttttgttttttttactgtctttgactttgatttgtggaaaaaaatgcttttgctgtgtctgtttcttaatgaaggatgccccatagtgtttcttgcagaaactgtctttccggaggtcttaattctgaatacacggagcccagcatgctcaaagaaatgctctgatgacaggggagagtagagacgatgtacatttaactgaggaaatgtactcctcaagaaagggctcagtgcagactgatgaggggctttattttgtccatgtgtgccagataaccgcatagcccagcatgatggcagattatgagttcatcttaaagaatctggaacgctccacacccaggtgaggtacactatataattgaggcatctctggcaaatcttggtttctatcctggcttccattgtgtttttaagaagctgttgaatggaacattcttttttcaatgcatagcactattcgttatttggaacagtgtttttttgaaaatggatctctgcagcaaggcctcagctgtatccctggatcctttcttaatatgacagcctgtcatcccccaaactatacagaacagccttgctttgcaacctcatgcactttttaaaaatttgcaataatgatggcaaccattaaaatgatagaaaccacttactaatcagtttagtaaccaaggacatctgctttacataatacagagacatattaaaaaggcttttatgttgttcagaaattgtcaaagttaaaaaacctagtggtaaaatcagttgattctttgtgctgcttttcaaacagctttacccttcaaacagtgactgtagaaagccacctatttgtgttgattcaaaatgtcttgaggaagtaagcccttcatagagcgtattccagaaggcttcctcacttgataaacggttattaggatttgagttcctttccccctccttttagatttgttcctttaacactatgagaaacaggcctcttacaacaagcagtcgtgaaagaaattctcatgcataactttaaagttttattgatgcatatcaagtatttaaattatagccaagctcaatttttctcatcaggaaacttaccttcttggacagaaacctaggaaattattttcaagtttgcaattgctgttgtggagatgaacagcagaactgtgggagtatgtgtcgggcacctggtctaccatagagtggggccagggcttgagggaagctccctggaggaggcaggagagcatctctccgaagggctagtcatgcagctgcaggatctgggagtacggtttatagtttggaatataagttcccgaaagtagcaaaaagaagaaaaataagggcaaatacattgtacatccatagttttccagttcctcccggtcctcagtctcccagctctccagttgtgtgtctggagtaaaatcctagatgttatgggaggaggcactttttacagccatgaagatttgtgatctctaaagtccttgcttacaagcacactgtttggaggtcccaattctgagtcagggtttgttttttgtttgatttttaaatttttttttagagacagaagcttactctgtcacccaggctggaataccatgacacaatcctagctcactgcagcctcaaacttctggactcaagagatcctcctgcctcagccccctgagttgctgagactacaggcacacgccaccatccctggctaattattttattttttgtagagacagggtctggctatgttccccagctggtctcaaactcctgggctcaagagaccctcccacctcagcctcccaaagtgctgagattataggtgtgagccaccatgcccggctgaggcaaggttttgataggtggtgagggttaagagttgggtgataatcctctgtgatgttagtgagtctctggggctgaacaccatgttgggacaattcctttgcatgagacatttgctctttgcagaaaagagcctgctacccccatcctgctgcgcagtggccattacttctctagtgatgagcacattaacagagcacaatccagtaaagtccttctaagatgaaaaacaaggaaaaaaatattaagctaatatgtacagtaacatgaagacctgtaccttttgtttttcttacagtctcttctttcttatgtccctgtctctctgtattggtcagttctcatgctgctaataaagacatacccaagactgggtaatttataaagaaaaagaggtttaactcacagttccacatggctggggaggcctcacaatcaaggctgaaagtgaatgaggagcaaagtcacgtcttacatggtggcaggcaggagagcttgtgcaggggaattcccgtgtataaaaccatcagatctcatgagacttattcactatcatgagaacagtatgggagaactgccccatgattcatttattgccatctggtgctgcccttgacacatggggatcattacaattcaaggtgagatttgggtggggacacagccaaatcatatcactctccctctgtctctcttgataatgaaagattagagatgtgtgtatacatacatacctacacactcaatgtagtcgctcttattattcttatatgaccttcctatgaaatgagatgggttccacctgttcatgagccttttttgaggaaaggacaatatcacttagattcttaattcctaataaagatggaaatgggatgggataaaggttgctccattgaaaataaattgcattacaaagatgaatgtaataaacttgatgttttttagatctaaaacagactgattcagctttttaaaatgtaacatgaaatggcaatgttttaaattttccaaaaattggagatcatttgtgtcaggtgaatgggaagttcagtaaggcattatcagtctgttattcaagcatctgtcccacatgcatctgttgagtacctaccatgtgccaggcactgcaataagttctaagcgtacaaggtacacacagcattcatggtgcctgatcccatggagcttacagtctattatacgtgaaatttccaaagttgctgaaaagattgaaaatacctttggtacatattcataaattcttctgatactttctatggcttatggatagcatatttcactttgattcacatatgcttatatatattttttataaagcatgagattttcttcttacagaccaggatgggggagaaaaaatgttggttgaagttttctttcctggaacaacaggtagattacaaacaggcataaggcaaaatttgtccccatattgtgtgatattgttttactcattacttcagtctacgtgacttcctttctaatgggaaccacttagctggaccattaagtatgatggtttcaggttcaacaggctctcttttgaaattgacccagtcagtggttagaaatggccaagaacttacacagatgtagtgtgaggacctctgggcccagctgagtgcagatcattaaacagcaggggccatacaaaccaaactctccagcggtcttacacccagggctcagggagtgaaagaatagtcagttctcttgttggctgttaatttggatgtaaatctaaacttttgagagctaggaatcgggatttttcagtgtcctttgttatttgtaatgtggccatagggtgaaagcccttgggtatgctccattgataaagagaggcaggtttagggtagtaactggataaaaaaaaaaaatgagagtttcacacaagcaaccagtggctcagagaggagagctcaaccgtaacaactaaattttgaaaatacttctctcttgaggggattaagtctctcaattcactcccttttttaaaataaaccaatgatgtgttataacatgctgtcttcattttaattcactccaaaatggcgcagtggtccagggtttatgctgttagagcggtgatggtagcgttttgccacactgctgtcacctctcggttttgctatcctgtccacttactttgtcactacagccttaaatccctactgcccccattaaagtgtctacttgtctcctaaaactcatttatactgtttgtttttgatgtcttccttggcaacttaatttatatgtctgctatttttcaaacggagtaatactctgcgcttactctaaattttgtgttattaaaatcacagcttttgggtttgtgtggcttccaccaatgtaaacaattcgtctcattttcctgtcaacacacgcttataatttttagtgtatttcctcaaattgtcttcccatcactcagaataaggtctttctgttcacttgacgtaaaatactacatcctgcagctatgctggcttgagctgctttacacctcctttgagtagtcaagatacgctgtctggaagacaatgaccaagtaaggatgagttcatttacgatgattaatgttttcctaagtttccagttctctgtgtttttatttttaattttctgcctttcacagcattttcagcaataaccaaggaatcctgaatcctttcagaaccatttttcgcctctgtatctgctaaccatttcttgccttttctctcacatgtctactcacatttcagggtgtcaaaaatggaccagtatacctacaaaagtagaaacacaacccttgcaaggtggactatagtattaagcaaactaggaagaagagaggggtttgacaactcactagacgttttcaagatggcattcgtcatacatacaagtatagatacatatatatgtgtgtatttacagttacatcagaatacagggattatattttcaataattccctaaaaatgcagacattgttgatgtatataaaaattgcctttcccgtggttcactctggctgcagctacttaatatgcagagctgtgtccaaatcagtgctgtcaatatacaaaacacaatgtattcgagaatatagaataaaacagtcatatctgtgaatacagagtaagtctttgacatttcataagtttcataatatatacatttctggtagttagcattttatatttcctactcccttgtaataattggagcatttgccttcatggtttattacatgcccctggggatatagttgctcttcagccatctgtggtcattcatacttttttttttaagttcattttcagcctctttattgtcttttttttttaatactttaagttctagggtacatgtgcacaatgtgcaggtttgttacataggtatagatgtgccatgttcgtttgctgcacccatacactcatcatctatattaggtatttctcctaatgctatctgtctgccagccccccgcctcatgacacgccccactatgtgatgttccctgccctgtacatgtgttctcattgttcagttcccacctatgagtgagaacatgtggtgtttggttttctgtccttatgatagtttgctcagaatgatggtttccgactgcattcatgtccctgtaaaggacatgaactcatcctttttatggctgcatagtattccatggtgtatatgtgccatattttattaatccagtctatcattgatggagatttgggttggttccaagtttttgctattgtgaatagtgccccagtaaacatacgtgtgcatgtgtcttcatactagcatgatttataatcctttgggtttatacccagtaatgggatcactgagtcaaatggtatttctagttctagatccttgaggaatcaccacactgtcttccacaatggttgaactaatttacactcctgccaatagtgtaaaagtgttcctatttctccacatcctctgcagcatctgttgtttcctgactttttaatgattgccattctagctggtgtgagatggtatctcattgtggttttgatttgcatttctctgatgaccagtgatgatgagtattttttcatgtgtcttttggctgcatacatgtcttcttttgagaattgtctgttcatatcctttgcccactttttggtggggttttttcttgtaaatttgtttatttctagattctggatattagccctttgtcagatgagtagattgtaacaattttctcccattctgtaggttgtctgttcactctgatggtagtttcttttgccatgcagaagctccttagtttaattagatcccatttgtcaattttggcttctgttgccattgcttttggtgttttagacatgaagtccttgcccatgcctatatcctgaatgtattgcctgggttttcttctagggtttttatggttttgggtcttacatttaagtctttaatccatcttgaattaatttttgtataagttgtaaggatgggatccagtttcagctttctacatatggctagccagttttcccagcaccatttattaaataggaaatcccttccccattgcttgtttttgtcaggtttgtcaaagatcagatgattgtagatgtgtggtgtgatttctgagggctctgttctgttccattggtctatatctctgttttggtaccagtaccatgctgttttgattactgtagccttgtagtatagtttgaagtcaggtagtgtgatgcctccagctttgttcttctggcttaggattgtcttggcaatgtgggctcttttttggttccatatgaacttttaattttttccaattctgtgaagaaagtcattggtagcttgatggggatggcattcaatctataaattaccttgggcagtatggccattttcacgatattgattcttcctatccatgagcatggaatgttcttccatttgtttgtgtcctcttttatttcattgagtggttgtttgtagttctccttgaagaggtccttcacatcccttgtaatttggattcttaggtattttattctctttgaagcaattgtgaatgggagttcactcatgatttggctctctgtttgtctgttattggtgtataggaatgcttgtgatttttgcacatggattttgtatcccgagactttgctgaagttgcttatcagcttaaggagactttgggctgagatgatggggtgttctagatatacaatcatgtcgtctgcaaacagggacaatttgacttcctcctttcctaattgaataccctttattgctttctcttgactgattgccctggccagaacttccaacactatgttgaacaggagtggtgagagagggcatccctgtcttgtgccagttttcaaagggaatgcttccaatttttgcccattcagtatgatattggctgtgggtttgtcataaatagctcttattattttgagatgtgttccatcaatacctagtgtattgagagtttttagcatggagggctgttgaattttgtcaaaggcctattctgcatctattgagataatcatgtggtttttgtctttggttctgtttatatgatggattacgttcattgatttgtgtatgttgaaccagccttgcatcccagggatgaagccgacttgatattggtggataagctttttgatgtgctgctggattcggtttgccagtattttattgagaatttttgcatcgatgttcatcggggatattggtctaaaactctctttttttgttgtgtctctgccaggctttggtatcaggatgatgctggcctcataaaatgagttagggaggattccctctttttctattgattggaatagtttcagacggaaaggtaccagctcttctttgtacctctggtagaattcagctgtgaatctgtctggtcctggcctttttttggttggtaggctattattattgcctccatttcagagcctgttaatggtctgttcagagattcaacttcttcctggtttagtcttgggagggtgtatgtgtcgaggaatttatccatttcttctagattttctagtttgtttgtgtagaggtgtttacagtattctctgatggtagtttgtatttctgtgggattggtggtgatatccccgttatcattttttattgcgtctatttgattcttctctctcttcttattagtcttgctagaggtctaccaattttgttgatcttttcaaaaaaccagctcctggattcattgatttttgaagggttttttatgtctctgtctccttcagttctgctctgatcttagttatttcttgctttctgccagcttttaaatttgtttgctcttgcttctctagttcttttaattgtgatgttagggtgttgactttagatctttcctgctttctcttgtgggcattcagtgctgtaaatttccctctacacactgctttaaatgtgtcccagagattctggtacattgtgtcttggttctcattggtttcaaataacatctttatttctgccttcatttcattatttacccagtggtcattcaggagcaggttgttcaatttccatgtagttgtgtggttttgagtgagtttcttaatcctgagctctaatttggttgcactgtggtctgagaaacagtttgttgtaatttctgtttaaaccattcattcagcaggcacttactttgtgccagcattgttataattcaccattttcttaatgctaaacccttagagtcccaaaactgtctcacaagctcccctgagcaggtaggggctggcctctaccaagtcttcacatgttgcccctccttgcaccccaggatggaagtttggtttccttactgggatgccccatagcactttattcttgtaagacatttatcactctctgctttgcactaaaagtgctctgctgagatctgaagagtatttgtgatgtgtgtatgtaatacatatttgtattaacggctttgagttctaaagtgtagatgtttttcccatttctaaccagatgacacatttttgagagcacaatctatctgatttattaccgacagttagtaatgttgtggggaatttaaaaatacacttaaaaatgtgtacttaaaaaacagtatatgctatgccaataattgttgggtaagtgaagattattgaaacatagtctgttattagcccactaaatgtgagaattcctttttctgctccacttttcattactagtttatacacaacagatgtggcaacatttcattactagtttataatacagctagatgaggagaaagccagtccctccaaagttagagatatgagaatcccctgaaagtagattttagtgcatttgcatattaacaaagagacgctcatggaaacatccaaggtgaatccagcatccaactgttgttacatacgttgtggttgttaaccacaaaaatcttgtaaaataaatttgaatcacttgtattacattgcagttctactgaaaatacttgatagcaatacacctcaaagtttgaatatttgatttcttcaaaacacttggcaggacagtaattgaattgggcgtgatatcgattgcttaaaagcctaacaagaagaaggcagtttccaagatgacagtggccttaagagtgtcatacaggaaaccagctgtcatgtgcttagcttcagggagaatacgctggagcaagaagcacgaggactcctgggactcactgtggacactgtgtactcagtcactcgaggaaaggtgccgtgatgtttctgtaggacttccgcccaatggtaagatctgggattcatcatcctagctgaatagagtcatgttaactgttggggttatcctggacttgataaacctgttctgaaagctgactttgacctctgtcttcataactggtttgtaaggtccaaagacactaaaacagccagcacaccttttgtgcactaagaatctttcacatctatcaatcacgggccacctcccctcgcatgtttatgtgctacgttagtatggatccatggaggaaggtgacatgctctcagctatgttgtggcagtagccatgggctgctgttgcaatgacagggagctataaactgtgatccataggatatactttgcagctagttgcagctcagtatataagttggctttggtgactttttttgggaaaagagagggttcagtggtgaaagaaacatcattaaaaggttgacccaggggtctagtattgcggctggttagacataaaagccagaactcctgcattataacatgtaatcaaagagttgagtttctgttaattcatagagaaaactcatagcagtcttggagtgatattttgggtggatattgagttttaagtcctgcattcatcaataaaaccgtaattttataaaagtggaagacttgtgaatattcaagcattttttgacagaaagtacagtttatatctgtgcacatgtgtgcccaatgtaagtctgtcctcaagttatccactggcatcacccaggtcccttacttccttcccttatgcgttgtttgtaacaattttgctgccaattaaacatgtctaccagtgtgtagtcaagagcaaagaatataaaacaaagatcattagtgttacttcttgtaaaatatttactttttgctaaagatctattacttaaaatgagtttctaagtgggttttaattattgttacttctctatttgtcccagtttttacaaggtaggttgtcttttcaggagagcaaaagcctagcatgtaagagagtagaatatcaagggaaggaaatacggacatattttcatcccagtgaaggctaaattagctcaagagcacaaccaagggatacaaattaagaaccttcataattcagcaaatgtgggcaataaaggtagaatcctggaaatcagcctgatcgtgaatactcaaaggattatgtattaaacaagacagggcccaatgaaattgtctttgtgttagaaattttcaattgcagaaagttacagctcattcaagacctaatatccataatgcagtctgacagcagcaaaatcactccaccggcaaaagacttaaatgaaaagcaatgctaaatgcctgcctaggagaaaaagtgacacagtgttacataatcacacgtccaaagggtatcatagaaagcaaaacagggccaccaaatggacccttaggcctttgctcatgatgcacccaaaatattagtcattcatgcagtgaaattgctttgttttaagcaccaatagagtttcttgacctcaaaacaggataaataacgattcaggataatctaagaggtgatggtggtggtgatctgtatcagaagctacactaatatgagcagggatggcagcaatgtttggtcaaattgagtcatgaaaattccattgattaaatactcctgttatgtttgaaaacataaaactataaagagcttaaagacagctgtagtacatgtgtcctctactttagaacgctagcatcatttcatcgtaaaatgggaaagcaggaaacataaaagtctaggaaagaaggcaaacacatctaacttctcccgaagagatctttggatccacaaggaaccattaaagaagaggacaaccaggtagagtaacagattgttagagccttgagttgaagatgtcaggaacctacatttcttactttagaatggaattctttaaacagaatcctgaaagctagagacattcaaatactgctctctctcccattgaatcattgatctttttgatccaaaagcatatgccgtgggaccaagaagaagaagaaacattcgaggtggttctttacttttcacagtttagaggcctgtgcagtgctcctgcaactaatggtaataactgtggtcattgtaaagggaaagttgtacatacgtatacaagatagggaatgtgttactaatgtcagaacaaaatcacaaacatcaatacttaaaaacaaaggggaaataatacacattaagcctaatctgatacatataatctcatttaatcctcagtacaatccagtatcactccgctttgtaggggaaatctgagtctgaaaacagctgagtaaattcctgtggcggcccttcccagccttgcacacctatcaccttggcctgactttggggtctctgctgacccagactctcttccctggagttctagtaaaaggtacagcttcttacagaagaaggtaattcctctggactgaacctacaaaggactttgaagtctttaaagactgtcccctccccagcttagcagatgttaagcagaggctgaaacacttgacacttagccagcaaatttggttgtatttttttacagttgtctttcgtttgtcacaaataggttctctttgtatttgtggctggaattccgtattattgtatactttgcatagactgtaaatgactagcatagcgatatttgtaaatattttactaagaatataattatactcttctaaagagaagaggatcgccgtccttcccttccttgtgcctgaatgaatccccagcaaaggcctgttgcagcaaagctaagggattagaggagataaataacacagtggcagcatctgcctgagggtgcaaaggggcaggggccctgcaggaggaacgttggcctctccccgtgttttgtgaatctaacgttactacttaggtgagtttggattctgtagttgcgcatcttcacagtaaaaagtggtggagttgctaagggcggatgagtgtggcctcagaagactcatccccctgggaactttcggtagccacagggaaggcttgcatagaattaggtcttgcctgatcaaagccttggagctgctgggtgattggacatggactgtgttctccctaggcatcttgtgcttgtccttccagtgctgattgtcctcggcggtgcccataggtgactctgtcttccgtaccagggctgttctgtggagccacagactgtgtgcctctctgttaccgctgtctccagcaccttgaagggtgcatctgctgctcacagaccttcagtaagttcctgctgagtgaatgaacacacgcttgtttgtaaggattagtgcttctgttggcagtgggatttgagaagcagggcacgaggagagagcaaggaacacccgggaacctaccctccctcagcctccaccttgttagagttcctcctgataggaagtggcagggaaatgcagtgaatctaaggaggggcacgtgtctatctttctgattgaaacacttttcttttctgtaattgaaatagctgtggccgctggcttgagaaaatatcccctaccttgcagtgtctagcatcaatgctgtttaaaatcttagatcttcgcatggccctcaaataccagtgtttgcaccttcacaaaatccttaaaggttagtcttgtagatgggtgttaggttgacttgatgctctgagaggctgagcgacaccctgaggaaaaaatgctgctttggtcccgactccctgtgtttttcctcctgagaagtctctggtcctgaccagctctggcatcatgtgccgatgctgtttaatgctctctcttaacttaaaatactgccgtggggttctccagcagtgccactgatgtctcagtacttgttttaaaataatttatatgcagcgtctatattaacctgcacacctctttttagcaatttctcccttccctgacaagtcttttctcgtacatgacgtgaaatagtggagggcagaggcccaggccaagtgcatggctcatgcattatgtttcttttggtttgtcaaaaaaccattgaatgtctgtgaaacgtgcatttcctctaaactccactctagttcaacacttagctaacagattttctaaaaattaaagcaattgtatcaatgcctatgaaatatgctacaggaaagacccttgcctttctgtgaaatactgtcttctaaatagccaccgtcatttgtgcctcctgctcaagagagggatgtcaattttgagtcctagagtcaggggtactctgagctacacttagtccttttctcattcatcctccctttatgaaatccatcattactgctcccccacattttgggcaaattgcatgggcatccctgactaatgaatttttcctggagtcctagaggcaaagggatagggctagcacttgtcaaggtatggtctgaggtctgtaaataatgtgtatggcctgggcggtggtggggaagggtacagattctagcatctcactctagacctgctgaatcagactctctggggtggagcctaggattggcagttggaccacactcatgagtaactcatggccctttgagaatagttacgtccattcagcaaatatttactggtggactataatatacaggcacttggctagatggtgggaatatagggatgtacaaaaacagatgcagaacctgagtatgctgctttatacttactgagaaatgcaattcaaccttggattggaaggttcagaaagacaactggaaacctgggatggagattttcaatcaactagccaaatagcaaatatttattcagttctcaggagaaaggtactatgctgactacttgagatgatagagaatatagcatggttcctgggctctgaggatcttatattctggctgggaaaacagcatatgaaaagttaaacttggccgggcccggtggctcacacctgtaatcccagcactctgggaggctgaagtgggtggatcacctgaggtcaggagtcgagactggcctgcccaacgtggcgaaactccatctttactaaaaataagaaaaaattagccaggcatggtggcaggcacctgtaatcccagtcactcaggaggctgagacaggagaattactttaacctgggaggcggaggttgcagtgagctgagattgctccactgcattccagcctgggcaacaagagcgaaactccatctcaaaaataaataaattaatagataaataaatataaagaaaaaaacgaagttaaacgatagcagacaaacctggttaattgctaagtgagtaaggctaacaataacagtgttccggctgtcactagctcttcaccgaatgtctccttccacctcaattttcccacatcctgattccatcctacttctagtgttttgttattttaatatttataatttaaacatcactattaggatgttacaatttgctgccgtaaggtatttggaatttttgaaacacaggccacctctgcttcagatggcatatcattctgctgacttaatattatccaaccataaagcaaaggtgaatttctaattacttagaaatatattcagttaaaataagctttttttctttttcaaaatgctatctaatttaaatacatacatatatgtgtatatgtgactatatggcatatatgtaagattatatatgtatatacctatgtatgtatgcacatgcacatgtgaaaagtgtacagcttggaaaatacaatgtgatatcagaataaagtaaggaaaagttatggtgtaagagctttttggatcatttgaaatgttagagattgctgtaggttggctttctaaagtagaccagaagatcctcgcttgggagttctggagtcaatagagtagagttagaaatgttctatttaatacttttcagtagatcttctggagttagccctctgtgacttaaatagttggaaattaaggcatattctttgggagttggatgcatataaattccagagggtggaagccgtgttagtacaatgctgtgggtaagagctttggttttagagtcagatggttttgtgtacatgtgtgtactctgactatattgtgtggccacaggacttaaatttcttagactcagttttctcttctataaaatggcctgagtaatagtacttatctgatagggatatagaaaatgttaaatagatgttaagcacttacccaaagtctggcatacattaagcactccattattgactctcattacatcatcatcattttctcagttagttaaaagagcctactgcgtgtatattaatttgcctttccctgaaaagtacgacaaattcagctccacagagtaacttactgtcctttttaaataccatttctgtgtggatctcagcaattgtgtaaacttttaaaaacagaattatccatattctttcagtgattgaaaattatagaatttggagccaagcttcaagtgttcccttgtaatgtgtacccaaagaggagaatctgactgtacgttgtttagtcattcatagcatgtataccaaccagtgtttgttcaatttaggatggtaaaaataatttgcacagtttgttaattgtgccccaataaaaatgggggaaaaacagatttagatgatagatgaattttggcttggaatatagacctaattaattatattttttagacacaaatttaaagttatttctagcacattaaaataaacaaaattagcacaatgtgaaactatatggaaacagaatatagcaatttccataagagactttgaaatactgacagtaatgattatggaattttcatttcccagcagctgccatttcttggagatgtttacatattaaatattagatcatttctaaaaaataaactgagacacgtaaatggaattattttttatcctgaggctcagactaaagtcccagagtatgacatttcctgggcattttctctgtagctctcaactgtcccagccttcggttgcagcacagagagcttctgagtggccattgctgttcaagacggtacagcttttccatgcttgtcctgggtctcttccttgacagacttattttattcattctgtgtttacacaccgacagctatgacacacacaggatcgggatactctgctgggtgctatggtgcaaactcgcaaagaatttatcatcgaacagtaaaaagatgagcctgaaaacatactgccaaacgtttacttttagaagactgggggcaggtgtcatgaactggctttgtttattgtatttcaaatcttgttttctttaaagaagccaagatgctaaaatgagtggcatgtgttcagtaggaaatcatctctcgtgtgtgttaaacagagcagtgttctccctcctaaacaatttataatgatgtaagatggaaccttgggtgctgtgactgaaaacggccataaattatcaagtgtaagtgggaaagttggtgcttaccatttaacttgagcctggaacatactgaaggcattaagtgcagtggtatgtgactgaactgatgggagttaatatgtaattactgttttttacagtacagttatggcaattatatttattctattttttggaaagtacatataatgtaattataattaataactgcaaagataggctcaattacttaagtcatgaaagtgaattaccttaatcatactgagaatttttcagccgccctgtataaagaatatctatggaaacagtaatgctctggagaatgttacttgtaaggaaactgaaataaataaatgtggagtttatgctgaaatgagtagttttaaacaatgaagaaaactatcagaattttatagcttgctactatctttaaatccttttacatagtgcatgaatcatcatgctttcattgtaaatttaaaattttaaatgaaatttcaagaaacattgtctttgcaaaacacagttctaaatagttgaaaagagtgaggaaagaaattctgttaaaattcaggattatttttgaacccttgattgactttcgaggaatattttaaactgtctagaaaactttgcattattatttatggtattatgtgctaaataaaaggggccatatcagtgttttcttataaatagtttagttacttttggggatgaaacttccatatagattatgtgatttttatgtaaaaatgtaacctacaaggaaggtatcgctcaagcttgtgagttatttgagtgcaattaatgtatacatctttccattattagtctattttaggtaacacttttaaagagtttaactcttccttcttacctaccccctgctatctgatgacttgccttatgcttcttctaaattttagttgcacaaatacctattctttacctctccccgtttcctttcccagtaccctaaagtagaccacatcattcagtttttttttttttttattcagcaaacaccccctcaggtcatctcaacaaacctctcaattctgcctctctcatcggctcatttctcttcgtctccactgttaatatggtagagtaagccatcttcaatttctcacttgcgttattttccaggaggttcaaaccggaaatggtttcgtgggatttcatttaaagtaaaatagacatttttagtttttgagagatggtgagccaacttttatcttttgagaaactgcctctgctcaatcagttagtcagaagtacctaaccgtaactaaatttgccttaaaagaaatctggttggtatattttcactcttccccaattataggtacccaaaagggcaagaattatattagatttcatcttttgatgttggtttttgtttttgttttgtttaggagacgggttctcaatctgtcgcccatgttcggtgcagtagcgcaatcatagctcactgcagccttgaactcctggcctccggtgatccttccatctcaccctcccaggtagctgggattacaggagtgagtcaccatgcccaactccgtctttagacatttaagtgccccatttcaactatctggtatgcttctctgtgaaatactgtaggtgtgcaatagtcacccgtccatccacctttagcgtcatgtagctcttctgtgtttgtatttatgtagacaagacttactgtattttatgagcatgtgaatttttaattatgaataagttttggtatattggaaaaaagtacacaatactgtatttgctttgtcacttataaatttcgctatttaagatttaatactctcaaatttgttaaattagaacaatttttaggatagtgccagtcacttatttgtattaaaaataagggttaggcgcagtgactcatgcctgtaatcccagcactttgggagaccaaggtgggaaggattgcttgagcccgagatttcaagaccagcccgggcaacacagcaagaacccatctctacaaaaaatttaaaaattagccaggcatgatggagtgcgcctgtattcccagttacttgggaggctgacatgggaaggtcgcttgcgccgggggtgttgaggctacagtgagcgtgatcacaccactgccctccagcctgcgtgacagaaggagaccctgtcttaaaaaaataaagcatagttgctaacttttgtgtattcgtagagtcattcattgagtacaattttttgaacactcaccacatgccgggcgctgtgctcaggtctgagaatgaaactctgaatgcttgactcctttgtggggaagctcttgtctaagtcattatgtggagctgaggttcctagcacagtgccccctaacctatgctggggttactggatggagcagaatagttccctgagaagtgttgtgaagttaaataggatttggcaaaaggaataaaggcaaggggcagtccccacgatggaggacattggaagggtgagttcagcacatttgaggaccagggggccgaccagtcaggagcagagactcggaggggtaggatgggaagagtgaggctataaaataagccacaagaaagctcctgaaaagccttcattattctgaaaggcttgaagagtacctacaggaactgtaaaagattttaaggacctggtgcaacagaagcagattgacgttcttggaagatttttctgggggagccaagtggaaaacacatttgtgtggtctagactagacaacctggggtggggaagaatacaaaagcaacagtcctcagttcctcaggcccttcactgttgactttgaagtgcagactaatcaatcattgcatgtttatttagttcctgtttcatggtgatgtgccttgatagataaggctgaaaattcagagaactgttagacctggttcctgccctcaagacatttagtctagttgggaggaaagataaaaacataatgtatggtatgtagtgtttcaatagcgtgcacagtagtttcacatatagtatctgttttaatccttgaaacaactgtaatctatcacattattgcagctgacatattattaatgagagactgtagcttagatgaagtcatgtcctgtagccctctttataagtaatgaagataacgactgcaaacaaggtctttggactccttggcaagatgccttcccacgacatcatactttcccacttgttaagtaataccttaaccaggtagctgcctgagatgaaaacatctgagattgcataaagtgtgactgcccatcagatggcttacatagatgacaatgtggtacgtttagagaagaattgatcactgtatcttgaatgataacttgtttcttgatgggagcaaattctgatttggaaacgaattctagggcgcagaagtgaatgaagtgtccagaggcagacaacagggtggaagagtttgtgccctatggttcttatgggggaaaatagggtaagaactgaaagtatcagttggatccagtggtgaagaactttggagtgacgattaaaagtggatgggctgggctgggctgggcgcggtggctcacgcctgtaatcccagcactttgggaggccgaggcaggcagatcacgaggtcaggagatcgagaccatcctggctaacacagtgaaaccccatctctactaaaaatacaaaaaaattagcatggcatggtggcggcgcctgtaatcccagctactcgggaggctgaggcaggagaatggcgtgaacccgggaggtagggcttgcagtgagccgagatcatgccactgcggtccagcctgggtgacagagcgagacgctgtctcaaaaaaaaaaaaaaaaaaaagcagatgggctgtcataaagagattaatgaccacaggatccgagaaatacacacctgtagttaggaaaaagaactcagtagtggtgcgtggaatgaatgggaaggtaagtcgtaaggccaggtagttaggaagagattctggtagagccaaggtctgtcctccctccactggggggactcagtcccctcgtgattcttctgtcctccctccactggggttactcagtcccctcgtgattcttctgtcctccctccactgggggaactcactcccctcgtgattcttctgtcctccctccactggggggactcactccccttgtgattcttctgtcctccctccactggggggactcactcccctcgtgattcttctgtcctccctccactggggaatctcgctcccctcgtgcttcttcctctcctcctgttgtcctctttttcctttgtgtgcctgtaatggacacttttccattccatatctcttgggttttggagatggtaaaaatgttcttccttatcccaccaattcttaataggcttctgtcaccttttcacagttctaatatccagtttaatgaaatatcttgctgttctttaatcatcatgattctggtttgttggaaatcggcaaacccttgaaatgctagagacttgtagaaaaacaaattcactttgtttcaggccctagggacttgaccattgcagcttaagatcgccatatgtgtgcttcctctcacttcaagttccggttttgtctgactgacggacccttccaggccagacagttgctgccattcatgccttcctgacttcatctgcatttggaatgatttccaccccagaagaattagttggatgttttctactatgcataccattgctttcctcttcccttatttgtagtttcttgcatatctcacgttgagaacttcaggcccccacacagtttaacgtgccctgcaatattttatgcttatttcgctatttcaaaatggctaccaaaggcaccagtcttagtatagaccttgcattaaccttttcagtgttctgccaagcatctacgttagaaagtctctagacatatatttgcatttattctcatcttttattaaaatacatttcttttcaaagtttatacctgacttaaattgtttttcagagtggtaaatgtctttactttattcttcaaaaaggaaacaaataaaatgcacagacctgaaggagacagctctttaaatattgtatattcccagcactgctgtgtatcagtgctgccactcaattggctgagaaagctgcttggcatttctgcagttaatgctttgctagtggtacattttcttttcatttttgggttcactctctaggcctctggttggttaatatggacattatctagtgaaaatgccgcatttcataatgttagaacaaagtttcacagtaattgccttcggaagacatttgcagctctgcatttacaacttactctcgctaatgcgtggcaaggtcagaaaagcagcaggcttgtgagtaagaaggaaaaaaaaccgtccctcttgctcataatgatttatgtagttgggcaattaggcaaaatacacaaatagtagttcgatattatattaatcaatttagccatgggatataaagtcataaggaatgtcatctgctggggatgaaacacagtgctcggtgcagaatgtttactgtatgcttctacgcaacagactatatgtagtttccagcagaattatcgtgcttatttaacttggctctcccatgctcctgtgttgaattggtgttgagaaagcagattagacaatgttaaatgaaggaaagaaacttcaggaacaaactttcaaaaacatagactgtattatttaaaaaaaaaaaaagcacccccaaggacaggcacggtggctcatgcctataatctcagcacttcgggagaccgaggcaggaggatcacttgagccaggagttcaagaccactctgggcaacatgaggagaccccatctgtacaaaacataaaaaatcagccaggtgtggtggtgcacgcctgtcgtaccagctactcgggaggctgaagtgggagaatcacttgagctcaggaggttgaggctgcagtgagccatgattgtgtcactgcacttaagcctgggcaacagagggagaccctgtctcaggaaacagaaaaaaaaaaaaaaaaaaaaaaaggcacccctcgccaagccctgactggggagtggagagttgaaaatatgcgaagctgtaagactttcttgtttatttctgtgtcgaaggcaaggcagcttaatagaatttgaatataactaaatccatccacttagcataactgtgttcctccctgtaatgcagtagccaaaggtaatctgtttgttatgtactttcctttattatcccagcaagtcccacattctggaagcaaatgttatatttaccataatccatgaaaggaaaaagcccaggctaaaaatacagaacagaacaaatgtaaaacactgctgctgctcaaggtttgtaattgctctataagtgagtctcaggcatctgtgtggcacagatacttttatgtgttgttgaaagagctggctgagcttcagatgggtttgcaggagtgtcaggattcaggagcgtctctgaaaggtgctttgtgctgaccaagcaaataatagcaggttgtatgcaggactcccacgtttgaaaacatgactgcctggtgagtgattgcatttaatataagaatcaggtaaaattgtccgcacagaaccagttggtggggtggagatattaaaggatagaatttttctgggaaatctatattctcaaatcagctactgaaaagggtggggacgctgaaggcaggaagtggagagcggaagtgagctgtgggtgactgcagagaggttgtagcactctgtgcagggctcccttcaagctgaatgtagaacaactgcacataaaccagacatgctttagaaaatccagccaggcctctgtggtagataagaagttgcttcatttatttttctttttttagtgtcattaccagtattggttgcactactgtagcgttctgggtgctggggatcaggttaggccaggtagcttctgtttaaaatgtggattttatatacgttgtttacattttatgagagaattattccttatgtatacttttttctttttcattttctaactactacttaaaatccaagaacattgtgagaatacctacctgtactctcctctggtacttttagacggtgtaaaacatttcactaaatccttacaacagcatggagaggtgggcctctttgtgcttgttctgttgctgtaggatctggcactctgatcccagcccaggattgcatagcaagaaagcttcaggagctgggatctgaacttgggtctgaagcatcaaaaccctccctcttttccatttactacacttcctacaaatattttgtagtattttacagagattcattttagtgaatgaatgaattattcaaataatgacaccttattagcagtattttccacatgttcatgtgagggttttccaaaaggacccaaagtgtaattaatcgagctttctaccagagtatcttttcgaacatatggaatatatctgtatctctacacgtatcttaaaaaatggataagataatgtgtaagcatagctgtgtttcaggtctgaacaatccagctttcataatgaggaaatatctttgttatcatctaaacaagcaatttgttttccctttccattttattactccttgtgtggcctgtctgtggtcatggttaactggtggaagggaattactcacaaagaaagtggattggagaagaataacgtggggtcactaagccacattccatcattccccaatggccacacgctcatgtgctctgtcggtgatttgttactatataccattgctaaataatggaatctttctcataatctaagaggacttttcaggattctttccatgtgaggccagaggcaccttgactctccctgtcatcagataagttcatcttgcatttgcaactcatagccacatccccaggtgtgtttatccacatagtgttatctttgcctggacgtcctgatagcacgggtgaaaagtaaggcagctcagcagccagcctgtagccttggtgtgtgacatcagaaaggatgtgtttatttgaaagaagaagatggagctgatttggtcaatctagttctctaaattgacattcagattgcaagatgcctaaataaaaattactggaagtcattagaatgagatcagtgcctgaactaagagacacattactacgtcctgtttatttatctgatcaatctttcatccatccacccacccactcccttgtgcctgccaggctctctgcttgagtgtgccaggatacacagtgaaggtgactataggaatgaaaaagggatgatggattcaagagaaactgctacttggtattttcaggtttttgtttttgtgaaggatgatactttgggaaaaggaatcatacttttcatttgctctggctttgccctcttggtgagaaattgtggtgccagcagtagtggtactgacacaaaaccagtgtctggacaagtcaaatgggtcgcattttagtttgtttctaaatatttaaagaacacttattttaagattgttagatttagaggtagaagtaattaaaaaccaaagctacttccctccttttttgtttcttttaatatcgtgagccccaggagcttctgtagtcattaaaaaataaaatgcatgtgcaaagcttgtccccataagctttttggagtgtggcttttatgcatataaaccaggatgcctttgttaagtagggtgagtcttttaaagtgatttggttcagcgtttcataatcacatggcaatatatgcaaggcaagtggattcctcttgtatttaatgcagaatttaagttacagaaacacacataataacggtttgccgattttgttaggaggaaattgtcctgattataattatctccacggcatagagttgagatttcatattactgtatcacttgcaaatccatttttgtgaacacctgaccacaggtctgtaaaactgccaagcagagcctcgcctgggctcacacacaaggcaagatttccttcctcccagcaggaggcatggcacagtggcagcaaagaggtttctctctccctcagacggccacagggcagaatgaggaaggtgtgtgaaatagtacatgtatgtaagatagattttacattaaagtacgagagcgctgcttgtttatttgcataaatgaacagccatgaaagtgaccccagtccggcaagaagaacgtggcttgataaggaaggggctcctctgttttttctaaatgtgtgcattaagtttccttgtattacagttgagagagtaaaaggtatttcagccgtactaatattacaactgagagagtaaaaggtatttcagccgtactcaattggtattttgggcaacagtgagaaccctaagctgtgggcattgctcattgttcagatttagccagcggaggcctgtgcctgccttcacacagcgtgtaacggaaggcattgcttttgctgactggtctggaataggccaagtgtaaatattagtagtgagttttgcccaatatgcttttttctcctatctttaaccaatagaaatacagggctgtaaataattgaagctgagacgcatccagtgttagagacatatatgaattttaatcacagtcaagggcagtttgacactctcactgtctgctggcaaggcgatccaccttttctgtcttgggtcacgatagcattgtgtcctttctcattcttgagatgcctggcttcctaaaatgaccatctttatttagattaaggacccatttagagtagttttaataatgtatgctttcatacataagtggttccataatttatttcaccattattcttctctgtcagggttctggaatgtttttgttaattaagcgggggaagagcaatatctgcctccagccagccaagctagttgcccttgttgttatcgattattatcttaaaccaaacacacacacacacacacacacacacacacaaagcaagcccagtagcctgtcagtaaaggccagttagtgtattaaaaatagcctcaataaacctcatcactctggtatcactagggaccttgctctgagctggaatgcatttgtcctgagttttaacccatttaggagagtaacctccttctgaatgctgcccagtccctgccaccacactggcattattgacaggtgtttttttttctttcccaagtcggagtctccttctgtcacccaggctggagtgcagtggtgcgatcttggctcactgcaacttccacctcctgtgttcaagcgattctcatgcctcagcctcctgagtggctgggactacaggtgtgtgccgccacacccagctaatttttgtatttttagtggagacagggttttgccatgttggccagaccggtcttgaattctgacctcagatgatccacttgcctcagcctcccaaagtgctgcgataacaggcatgagccaccacgcctgacctattgacacatatattaaggaaatgtccccaccctcatcagcagatgcagttttatttcccacatagctgaatgcacagatctgtgggtttcatgtcatctaggtgaaaattcctcaggaacgaatcttttctataaagtaaatatgagccccgtggccagaggaggtgggatttccagaagcagtgtactaagtaaacccgaggctttgcgccttgtgagggtggcgtcaggacacatttcgtgttcctcttactgctgcatctcccgtgctctgctctcactgactttctttggcttctcatgttcctgtgtgctgaggtagaacgtttccaagctgtccacagagatcacgattctttgggttgctaacgaaacctctgaatggaagcctcaaaaacaagctgatcgctaagtgtgtgtgtcattataagcccataattaggaagttacctcatcatcttgcatcgaccccgatggaaatatactgtcttcaggtattcagcacttgtcagttgatctccaaaaaccctaatgtctttcccctgttaaatatatccgtgattctatggacacagaaaagctcacagttaaatttcccaggggaaatgtggtttccaaaattgataccatatgaccctgggaggagaattaaaattgtttttgtagtaatatgggttgttgttaatatttctgtatcctcctgtccttggtgagtttttagctttcaacatcagtgatatctgtttcattgttgtctttactaacataagacacaagtctttccaagtagttctgttttccctaaatcagtcatctagaaaacaaacatacacactttgtgattttcaaagaaaatgtagagctgaaggcaagagcacaggtatcacgctttttgtggtttataatctttattttgacctagttactttgtgacgcccctcccagcatagcaagtgtgtgcactgctatctaaacatgaaccctgcatgccatgtcttagaggaacttgcgatccaccttgttttgaaaagacttccttcataatcatacttgaatgacttcattgatttgggaattcctgtttagtttcttttgtttgattgcccttatataatggtctgcaagaacaaacatacaaacctaaaatctaaaagatacttttgacaccattcaaagtggagattatggttgaaccaacagtggctgcactgagctccagcttccagatcagcagttgagctgcctctgtgtacccaaacctccccatgtcaaccagcaggaagaaaacaaaacacctgggcagccatttgttttcagctttcacttttgcatttgcttttgaagctgtgctatgcaacacttaaattataatctgtttatttctctcacatgtggagctcccgtctctccaatgagtttatttagcaaatgttatgaattcaggaaaattatgattaattttggagccccagtctagacctgtcattttaacactgaagaactacagttagatgctttgtgtggttattaagaagaacagtaattatttcagtagtataaaaatatcaacaatgattacaggtgactttttggcttaaatattcaactccccaacacctttcaagaatgttgtgagatcataaaaagtccaggagcaaaatattagttaaggaagaatgaggctatttaattggttagacttgttggtgagaaaggcatgctgtttgtagtctgtttccatgaccacagctgtttccccacccagtttttagtagtataatattaagccttaatttacaactgaaagttttccacctccggtcccgtagtccaaatcaagttattaaatttaaaccttatggcttttcctgtatattccctggattcagcttaccactttggcccctattaaagaaccatattgctagtatcccgggctttgtgtgtacttgaattgttttttcttctgtatcttttccatggatgggataactgggaaagagacgagggagtgtgtgagtcagtaacgatagtgtaggattttgctgttgccgacagtttatggattgttggttttgtattgtttttattttgtcttttggcaaggctgtgttccttccagttgagtgaggtggatagagttttgaactctggactctaccatcaccttattcctggagatgtatcagtaccgtatacacaggggaccctatgtgtggccatgagccttgctgtagaacctgtggctccagagagccacctggccacagagagcaaaagataattttagccttgaactaaaaggaggaatgaggctgtgttttctggaccaaaccctaacttgagtccctggatgtttacatcttatggtgaattgagtcaagaaaaaaaaaataagtagataagggcttttaggaaacatagaatattctttctcctaaaaacaagggtgtctggtttaaaccatttcttcttttcccactctgccctgagtctcactcgggtcatgctccatcttgcaacttgggagaagtagccccctctctgagtaggaggcaggcgtggggcagtctacacaagcctttcagagttagagcttggtaaagagaaaaagaaatgctgttcagggaacaagaattgctgtagtttcttcaaaagcagcagtgaaagtcctgaccctagcaccatggcccagttatatcctagaccttgggtttgactcctgtgaattttcctcttgaagaatgggcttgggtaggagtaagtggatgggagaggacttgggctgttccacatgcaggggtgcagccaatagagttgccatgccccacaaaaacatattcatgtagtcactgcgaaactggaccaagtttggacagaaagaaaagaactttgtgacacctcattcaagaccttgaacattaggttgtagaagctactaaacaatgaggaatataagagcagtgacaacgcattgttcatcattgtgttctgaacacagtgcatgacaccaagtaggttctcaggaaacagttgttaaataaaaaaaaaaaatctggtgggaaagattaaataatgggactatagcaaggtgtcagatagcatcagctatacaagtctgtgttgtctttctagagagactgtgacttacaaaattatccttttaacttcccaccctttcaacttgtcaccttttaaccttttcactcagaatcctaaaggatgttcttgaacaaaacataaaaatctgctttatttcttagtaatcttttctcccaaaaaaggaaatttttccttcagttactttctgtagcatctttccttgaactgtgctgtagttcacaattccatagtctcaacttgtgtcttcagaatgcatcaaacttacataactcttgtcacagttgtcagtttctctgacctgctaaaatttcagtagcacctgtttggctgtggaataggcaaggatggctgtggactctggcaatcccattagagttatccagcaccccagcatcgagggaggtggtgggctccatcaatccaggtaccatgagcttggctgtggcgctgatttctctaaagctcataatcttccacggtcagacttagcaagtggagctcttccttccagaagcaaaaacagattccctggaccacattacaagaaaaaattttacgaccaagtgaagtcatgtatttctgaatgtcagctaaagcctcatttagagccgttggctcatgcctaattttcccaagaaactggcaatttaattttttttgctgttgttcaggttgacccaccacatttaagccattctagaggggcctttcacctgtcccctcttaaatatagatagatatttttgaatattctcttccaggtattttttgacaggttatacatatgctaatagaaaataggcttattatttgaagcacagagctgcttgtcaccgaagcttcattaacaccgttatcaccgtctgacatttatcttataattttctagagctgactgttgtgtctccatggaaacccaaattgcaattgaaacaagtaggataataaaggcatccaccgagattgacagcatgcaaagcccagttacatttgttgatagttccttcagtagctacagctagagacagagaacatgcgctttgtgtgtgtaggagtaactctcttgtgtcacaggtcgtacctgactctgcttatgtggcaagtttaccctaacacccttggttctgctgtttctaatggagatgctaattttccctggaatcatctcatctaaaggcattatgaatattggatgtacaattaaccgtgatcttatttggatccaagaagaaaaattcttcctgggtgattttgacactgtgaaatgttgatcagtccctaaactggcatcttgtggtacctgaatggatttctttttgggtagggggagcatccgcagaattgtacagttttttccccttggtatcgaggaacctgtgctctttcaagttgatgacttcacagcaatttggttgctgcctcaaagcaaagagtcatgaaactggagtgggtccagaatgaattaatctgaaattaatttgattctgaaagactccatctggctgtgtttgggaaaggcagttagacagatatataaacacatgatcatctgtattcattgtgccagatgtagtgtcaaaaaatgaagaaatggctttaaaaaaatcaactatggggagttttgatgtaatgatattcagcttcttagtataacagccattataatttagcacataattctacttttatttgtttagggggttatatctgatggtgtgtgttttaagaaataagcaaattaaatatcaaagcctattttaattggtgatttaagatgctaaatggaatttatgacttgctgagagagagaagaagcaaagagacaggacctatagatttccaaatcaaaatgtagtatttggtactgatttcatcttaagatacaatttagggatttaaaaactagcgaagtagaatgtcatttggcctttgccttttgagatgtggttttgtagcatgacagaccagcatatttgcatggaaaggaaacatgcaggatgaggtggcctgcagagaactctggaagtcctcttgcaaattgttttgagattgtcagagaggcgcacgtttgaactgctgtcgaggaattcagtgcagtcactgtagtgcatctgattgccttttgttgtgtccagacaggaaaattgtaggaaatgtacacttgtccctttaatgatatcactgtcatctctttggggcattttatatccaacttttaaacctcatcaatcatctgttgtgatgcgctgaagagaaagaactaaagtttacttctggattcatgatacattactgactgaaaaaacaaactcccaaaagggaacaactcattcattgctcccatgtactccacccatcgcccttatttctcccggacaagatgacaaaaacaatcacaggtagggaaaaacccagcaggatacttagtcagcattaacccaaacaaagccgaagagtttaggcagagtcagttgttgcattgaatgacagcaaattagatggtacacaaatctcgacatttgatacgccactgtgtgaaaaccagagtaacatctcagctcatccctgaggaatgagccagtctgatgagctaagtttgcagtacagttgaaagcttctcctttaaggcaccatttctctttgttgtctcattttgaaggaatgcttcttacaacaagttatatatttcccggcctccttaagcagaatttattgagcttaatgtgaccccttggatgagacaagcttgtgattatacaaatgaataattgcgctgtgctgccgtccttgggaatggctagggaacacatctgagcccctgctgcgagtgggcttttcaccacgaggctgcttcagaccctggtgtctgccctcatcatgacatgggcctgcctattgcagagcctcccttttgtttgctcctcgtcttctcctgcaggtttgaaatgcaggtgatcaggctgtggaaaaccaacatgagagatcttggaggagtgggttgaagagttctccagagacctcaaagggcatgagcatccggatgggaagtttgtgacatacgtttctgtctgctctaagatcatttttttctttatgctgactattcacaaatattggagtttgaaggcatttttgggaaaaagaaaaatacacttgaatgtaataaatacatatccctcttcacaagtggattctgttttctctctaaacaactaccgtcattaatatgacataattagctcccatggactgtcaacttttgattttccagatcagtggaaggagacagtggcgtccttaatctcaagtgcgttcacatccaacctcacactgctggctgccttccttagcctggcgtttcatttcagttgtattccttgattacacatcatttacgactgagaaaggtagcccaaaagcaggttgaggagagaccagcctgagattaaattctgccattgatagatgataaaatgaataatgaatggacagataatcagcatttaacagaaaagtaggtggagttctgaatgccgggcaagcacaaaggtcagtgacgcctttgtcctttagtccaaattaggaaagcccaccaaccagttttatattaataataatgtaatgagaacaagaggatagccagaatcaggacagtggctgttcagggacaagtggacccagcgggcatttggagaaaaataggcatgactcagtaactgactagtaataggtgtgttgactctcggatttaataggacggcactggacgggataacatggctcttaatagtggcgacagatcacatgacgtgtgatttaattttactgctttgaagacttctcgcgtgccgtattaaatctattcattcagtaaatgtgttttgaggatgtgctgagaccatcctcaccgtccagacgaggccttccctgaccaccttatttaatattgcagccctcttatttaataccctgcaacgccctcccctgcatgctttatttgtctctgtcaaaacggtctttttaatcgataaggcttacttatttgcctatttcatgcccactctagaatataactccgtgaagactgttttacccccactttagtcattgcggtatccccagctccttgaatttgtcagactcgcgtcataaatatgattaagtgaatgaatgagacatccctgtcttcaggatgtcacacttccaccatgcacttgatggggcttccgtgaatcgctgtttctgaggttccgcggtcagagaagggaaaggccagagcaagcagccagtccgcattacacgcatgttctgtgtgcagcactgtttctggtcatggattgctggttgggaagggaatttgagccagtatgaaagacagggaagatgagcctaaaagctgattggaggaaaagaagaccggaagagatgaactttaggtgtgctgaatttgaggtggtgccagagtgtgctgtgggattagagtttaatggtcaaaatgagggcagttattttcaaatacttgagaatgggtgacctctccacaggattcccacagcgtgtgagaatgaagggtggaaatggaaggtcctttgcggaacaggctccagggggtggcatttcaagagcaggttgggggatgaggctgtgtcccctgtgcaaagtcacccatgcacatgactgccgtcggcgccagggtctttgctggtacttccgtgcctctcacacatgcatggttgtagaggagctgtgctctggggccgcgtttcccaccttcccagctcccttccttgttagagccgcctttttctccccagttttttgtttcgtttcaatgccattgccaactaggtgaaatggtatagcctgttgtcttttgactttgatatccgccctccccccacacacacacacacaaaaatttcacttaaacattgctcacagggatgcagcatagttcagaatgccaaatgcccaatccccttggcttaatgagtcacttgtttctaactaactccaggcctttatttattgctctattataggccttataccacattggttttggttttatgttgtgtccatgtctgtctcttctaattggccatgagcagcagaaggacataaatgacctatttttcagctctctcaccttcaaacctaccactgtgcctgacataaagcagatattcagtaactgagaatgagaaggaaagaaaaggactcagggtaaacctcagttttgtttaagattctgcaaaggggaagaactggctttcaccacccaggcttctgaagtgtgtagagagggttgtgaatccgcactgaccgtgttctcttgcataaataagtccaggcaaagtatcttcagtggtgaaaacagaagttacctgccttgagaagcacagtcaccacaacctagtctgcagggaatcagatgtcgtgtgtctttcgtttgccccccttgatgtgggtccctttaatcatttgttgttggactgtggaggcagtgggggacattgtgttaaaaatcattcttcatcttgggaagcgcaggcccctgttgagtttccccctatatttgtcttcatcttatcattttacaaggattctctttgtagttaactgacggtgaaaccagtctcctgtcaatcatccaaagagccactttcaattagttgcccatagccaacaggtggcttcagcagcatccagccattggcaggtaagtcagactggaaggataccctagacctgctgtagaagcaggggctcctggaggaatttcctgtctgtaaagttaggggcagtcacactgagctcagccgcaggagagaggattcattggtgtcgtccctaaagcgctttgggaatgggaagccctcaataaatcttccttgtggtgattgtttccctgttgccatttctaaaagttcatctagaacacctacctctccctgtgcaaacgcctcctgcttggccctgaagtccactgaactatttctgataaatcacagaaggaaatgagttgcctgggtgagggctgtcttaagctgctgccttgctcccttcccagggagggttattgtctgttcagccatcaggtaccccctagatgtctccaaatttacttctttgtgggggttctccagctttgtgccttttactagcagtcacattgaaataaggtaataaggtttcccttttccaaatgcctgtgttctgtgatcttttctgcaggaatagttctctacgaattttggatgcattttaccctggcaagcatttgagacccccaaccgaacacagttcagcaatacctttggtaatccagcataatgtccccaagaacacaaatgtgttatttcttagttgtttgtgaataacaatgatgtcctgtacattcttaagaaactatttttttaattttgtcaaagtgcaggattgatcataaggtaatacgtgtgtatgtacatataggaaacctgaaccttttcttcagaggagctcaagctatttaatgacaatttgaccatttagagaagggctttgactttgtaatgtttagggtatttgctctggtcaattttccatgtggattcactagctgatgtgtggccatctcagagatggtttggggcctcattccataatttatgtggcagtgactcaaaaggtttagtacacatgataaatggtaacaataccttccacctaaataggggagtgtcattattttcacatatttttggtggcgtaactgataaccaaaacattttgttaaatttacccaaagttttcagcagccctggatgccactacagttaagacatagctgtgtcagaaaggtggcaaactctgccctgccgaaaggcagtcatggaagacagacgcgtttttcatgatgactgtgaagcagtgcattttaaaagggagttgcaattcccagagctctgggttggatgaccactgactcctcttcctaaatcgaaaggatgcgctaagttgagcatggacagggcgcctcctgagggtagggcctgagtttctgatgtgttctccagcatgcagtgtgggaaggagctgatgctgagaccttagttgccccactgccagtctgttgggaagagatttctcttcttaaataatggcaacaccaaaatgaacaatgtagagattgttaatattaatgaatttcatgtctgtcctgttacccgccggaggcaccaggcccatcgccaggttctttctgcttttgccttaagcagctgagtcttggacagtttcctgtaataaccaaacaaagcctgtttcttcgtgtgctattacttaagtacaagtgatatttaaaaatgattcctgagccctttgaaagagtggcttgttagctacagaaatgatgggactgaagttaggacattaagaagagcattggcatacctggcaagagatggggctctcgcagcaccccaattaaccggccactcagcggcctgtcggagcctccaggctactctccatagtgtcagtgacaccttgtcagctctccagcctgcagcctgtgtcacctgtgagccagagggactgaattggacacaggcaaggaatcacaacaagatttcaggcagctggttatattatctaaattagcttttccatgaatctctgggtccagaccatagccataggattatagaaattaagagccagatgggaactatcctcttgctttgttttacaagtgaggaaactgaggcgcagagtggtcacatcattagcctcagatcctagagttaagtggttgctgagccaggatgagaactcaggcctcctggcccactgttcactgacctgctgttgagggcctcaagcactgatggggctttcctggccccatattcttgtgtttccaaaacaaacctcccatgcaatgatgtttagataaatctcaactctaatcagtaaaaaacaagcaaaggacaagtatatttgcatctatagctatttaggtaaactgaagttaaataaaaattcaattccttagttgcattagccacatgtatctagtggccaccatattggactgtgcaaatacagaacatttccttcatggcaccgggttgggtagcactgacgtggattatcccaaggatcaaaaaaaaaaaaaaaaaaagagtattggagtaataagattattaataactaccaggcagattttctatctttacgcacaatttttctaagacaaggcttttttgtgtgtgcttttttatttagtttgcattctgaagatgacattttatgtcttttagcattcgtataataatttatagccatttggcaattcttatagccattttgtaagtttgttcttctttttatataaatgaaggaaatacaacacagaaagttgcccacagaacaagataaaagaatagaaatttccattcttttgtttgcattctcccaaaggaagcctgcaaatcactgggccttataaaagcttgttgtcctaaaactagtaaaaataatatgttgaatcaattattataatagtttactgattagagggacctcagaagattttgcatatactctgttgatctagttatttttcctctaaaatagggaagtaggtcagtgcctgggttaaaactaaaaagtaagcactcatcgtttttccgaacaagatttcattttcatcttgtctctgacactgagaatactattgcccactggcgtagtgcttgcagacttgcggtcttattccatatggcatctgtcttagaggagccttctagctggctccttgccaagggtactagcagaattggcactcaggatctcattgcagtttgcaggcaaggtgccagcagagatgtgtgcgcatgtgtctggggcctgcgagtggtcaccgagttgggaaatgtccacctggagaaacccaactcatggaacgtgaagcagaggcagttgaccttcacctctcactgcattcacattctctaggcaccttttgtgtgacattggaaaagtcaatgtatctctgactctcattgggttcatctccaaaacagataatgattccagcgggagctgttgaagagtattgtatatcaagtacttggcaaaggtttctggcaaagagtagctcctcaataaatattatttgaatttggatgtaaattcttggactgtaagaggcactgtactgggtgttgagaatggctagggagtgaagagaagcaagctagtctgattttctaagccctagatgaggttgttgtaaataggagatcttctcaggggtcttgctgagatttggggtgtctattcctgtaattacttctctttgaagagcacattggctgtccttagtttctagcaggtacctccaaaggtttaactgttgaacacataatttctggcttgcttagaagtgtcagtgctacagccccatgaggatgaaagaattcagtgagtctccgctaaaaatgagcatcagccagggagagagttgggagtccagagcaggattcatttgggtggatgagaagggagtaaaccaagctgcggcagtactgtggggattcagggcatgtgattcggcagtgccaggagagtggtcggtgggacaggaccacccataccacccatttcagcagtgccaggagagaggttggtgggaccggaccacctattgaggcagcgccaggagagtggtcgatgggacaggaccacccattttggcagcgccaggagagtggtcaatgggacaggaccacccatttcggcagcgccaggagagaggttggtgggacaggaccacctattttgcttttgatcaggaaggtggggggtggtgatatttcaacttgtacagcaagtggacatcattggatttacttaaggaagggattgtcctgcccttagaacttgatgcaaatctttggaaaagttacttccaaaagggcaggtagtttggcaaggatgtagatagaaatgagaggtgctcatgggtggctctgtaggaatagagaagaagggaatctgtggagatggagacacactatgtgactgagtaaatgtaggtttcaaagtagcctaaactggggtggggggggtgaaaaaaatgtaaagtacctatcacaatatttgctatataagtgatgaccaaaatacacatattattatttaggataggaattgtggttgagtctatactataaaaattttgaattgaaaagtagatttttgatggtcactcatttcagatgcttcacagatgcaaagaaggaattaacagtaggaatagccgacactgagagagcccttattttgtgccatgtcttgtattaagcacatgagtctaagagatggagtccgctatacccattttacagataagagtctgaagcccagagtagcacatttaggaagaggtgctgccagaactcagagcccctgtaccacactgcctctagatgagaggtctccaggcagcggtgaagcatggctcatgggatgaaatactaatgtacaccagccacatacaggccagaggcatgaggcattggccggctcctctacttcccttacttgatgcatcttggtgagtttatatttttcgaaaaagagtaaatggcctcttatttgcagaagcattgaagactgcttgctctagaattctgacactagaactagtacaatgccactcccttctccattgtgttacattatgtgctccgcagatgaggtgcggcagccccattttttgaacttctgttttctgttagccgagacctgtggcaataccttcctcttttcaatctagctggttgtcaacagcagtaaccacaagtctttcctgtcccagaaataagtcttgccacactctcaacccccgacagggtgtgaacatgacatgctgtactgcaaggggctccactgcctccaccccgctacagccacagacccacagggttcaagtgttgattgaattctcaaagagcgacttaaaaaggataggtgcataagaacaagataaacaatctggctctaatataaacaaggattacattacaccaaaattgttgagagaagattttgtactcagtattttattcagcagaacattttttataacaataaggttgattagagcaagctctgaaaatgcttcaagttagacagtctgattgtttatttcaaggataaaaaaataaagtggtaaaatagggggatacgaagaagtagaaattgaaaccaggacctagcgaagagtatttgacatcattttcctctctaggttgaatctcattcaggatttttccttaccccgtagggttttggctttttaaccatgagtatcttgtttttaggggcttagggccatcctagacccacagcagatttaaagtgctctgatggtgtatttgtctggtgtttcattttaaccaagtaagtagctctctgtaagatctttgtctaccttcttggtagtaccaggaagctacagggagatcacatctggcccttgcagtttagtattagttagcatgtcccctttctgacctctctgctttttggggtgggtctgctcatggaggaggctctgtaggggcagcttctgcctgctttgtttcggcgccttctattttcacaggctgagaagctggagcaagcgcgcagtgctgcaaatgagctgccgagaggcattcagccttgtcacttggcagagtagctgggttcagggtatatttggagcgggggtagggggcacaaaaagggtacatggttttgctttactgtttattcctgctcaaaggagggtgggggcaagtgaaaaagacatgtcttcatcatcgtattacttgatggtgactagaagtgcgggctgtacacagcattctcttccaaatggggattttggaaacagcgttgaggaggactgatatgcaaaagcttatggttgtgctctctgtcagccccaaatatttactgaagctgggagaagaaaaggcagactttctttttttctctcccaaacgtgtgattgtttagaactcaagtgcaacatctggaagtcagatatacagagaacaatttatggagtgtgagagatttgaaatattcagtgtcttttagtgggaactcaactttctggggctgcttttttttttttttttaacccagcacaaagcaggcaattctgagatctcctttgcctctctgaattaaaccctttgtgcctgggtcccataaacaatgtgctttttaaaggggagccccctcccagctccggcctttttctccagcgtgggcagccaatcagctgcgcagagctgcatagctggaccgctttccattctgagtagcaacaacgtactaatttgatgcacacatggatgcctcgcgcactctgcaaattcatcacccgcatcttgcattagtcatctgacggactgccaagtgtttcattttctttccatgtgactttattattaccacctctctcctctcttccaaaaacctcccaaaaagggcggtggggcggggggcggggcagggagagggagagaaatccagcagacatctagctctgcctttctttcccagccacagccagggtagggctgataaggcgctgatgcgttgatggcagccttgcagagctagacctgcacttaacttgcagctgcctcccgagcctccaagatgtccacgccctgggtgacaggcggcagggcgctgccccgtgctcccccggctctgctcgacagcagcacgcagtgagagcctcgccgccgccgaggagcaactcatggtgcctccgctttgttttagttcatcaaatttctacgactcattaggcactttgccactgctcttcttcctcctccttccgcctccccgctcccccacccccactattttttcttcctgtccctcatcgtgccgccctaactctggctcccggttccgtttttgacagtaacggcacagccaacaagatgaacggagctttggatcactcagaccaaccagacccagatgccattaagatgtttgtcggacagatcccccggtcatggtcggaaaaggagctgaaagaactttttgagccttacggagccgtctaccagatcaacgtcctccgggaccggagtcagaaccctccgcagagtaaaggtacagagcgcggggcgggggtcgccaggcgtccaggtgggcgtcgcggggcactggggctgtccgagcccccagcctgcaggaggaagggcgggtaggcaggagggctggaagcagccggtgctggcggcccctgtgctccaggggctgctcccgactcctccccgcacccccgcccgcctgcccgccgggacaggttggaggcgggagagagggaccgaggcagggcgggagcgcagaggctcggtccaggcgcgtgatcgctcccgggaggtcactttctaggcagcccagcctgtgcttgggcggggtggttgcttctccgaggaatcgcgtttcccagccttgtatttcaggacctaactcttcccacccctacgttcctaggcttgcccatgtaattacaattgcatttcacttttccatagcctgtggggacctctaggtagcttataaacagttgacgtgatgccactggtgcgagggagaaaaggctcccctgaagaagggacacccattcctgggggtcaggtggggaccgtgaggtgaatctgccttttggagctgggagcagcaccctagtggcctgacatagttaggacaccttcacaaatgcttgagggttacgcccttatcagtgtggagatgaaggtataggatctggtagttgttactgcctccattttaagatgacggtgatggggggcagtgggtgccattaatgagatagagacccagaaaccattgtgaggagtgtgatgcttctatgccctggagtcttactttgtaagctctttgcagactgaatttaaaatatctactctgctgctaccacttggtctctgttgctgttttaacgtttttgctttagtaattttttcttctttctctgttgttgatctctcagtctctctactgaggagtcctctctgttgttctgcgggcctcacagtttcttttgctctgtgccttggtgtttctgtctggcatgttattttatttctatattgcttctcctaagacctctgaaagcatcacttggcttgtgtatacacttcggttgggcacacgaacatattggcacatacttttctctaacccttttccttactggcaaggtgaaatgatagaactaggaaatctttaagactgacattctgtgactccgagaaattttgggctgttcctcttgttccctgttgttgccagggtctggcagggctttggaagcctcttaaggaactgaagagcccctggccagtactcgttttagaaaggtggacatgcgtgtcttcggagtgtgttcataacactctagttttccaaacgtagtagcaaggttgtttcaaaaagcacatagaatgttgtcaccacaaacttgattgcctcattatttgagacgtagaaagatcagataactgagaatctgtagatttttaaacttcacaaatgagcgcaatattaaatacctttattggacatattctgatactggttacctacatgttttccaaatggagaagactagagtttgttttaatacttccatggtatgctattgaggaaagacaataggctagagctaaaaaaattaataaatttaaaaatcaccaaataagggctctctcaccagccagactgtcacctagggaaaactagaccagaggcagtaaactatgctttagagaaataaccacaattcatccttgacaaggaaaatgcgactccaaattttggtttatcagcatttttaaaagttacctttgacataatggtcagagctcacttactgttatgatgcctggttccgggactttcagccatggaatacatgtatcttaccttggccaaaaagtcctttttcccagtcaggtaagtacctatgtgtggcctagttattctcccattgtctctctcttgcccagatgttcctatgagcagcattttttaccagcctatatttgatactatacattttgttaacttctgttcactgtgcctgattactaatttggcgaaaatagtttgcagaagcccgtggggctgcagaagaagggaggcctgatgagggaagtttttttgagcacgtgctatgtatctcagaccctgtgtcaggagctttacatgtgtcctcattttgtccttaccaaaatccagaaggtaggtggtggtagtcacattttacagatgaggaaactgaggcttataagaagttaagaaacatagccccgtttgcccagctgttaagtgacagagtggagattcggacatggtccatctgtcttcatggactacaccattttgcgtctccatgagatgagatggcagagtagccctggtgtgctgtgtttcagggcctgggtcaggggcagtctcctttacttaagtgttccccaagtgaaaggaagaaatttcattcttgaagaatgagttgatttcatttctgtctttgtgtttagtttttatactcaggtgtttagattgtacatcattcccaccccatgatatcatggggtaggagttagagatgaaatcattcaaatcttacctttggaaatacaggtcaattcccattactgtgaactccaagtctcacatcaaatattccttaaagtatgtgggctgtcagccaaagcttgaaagagcttttgttatacagacatctctgttgtgaaggtatttgttgtgatgggatttgagctgtataatgacattgctctcagaggattacagcccttagccgcttacctagagagagcaacagcccccactttattcatgttgatacctatgcatgccattattattttgcctgtttacatgtaaaataagacctcacatttactttgattcagactttgtcggcagagtacaattatcatgttttcacagggctgatatcagagcctcagaaactagaattactggaggtggtttgggttatgtgagtgaggcttttggagaggccttgattcattgccttacccgtgttgatggtcccaggcaaagagacagtcaggctgttacctaataatcctggtgaattagattttccccctcactttccatttcatcttctgtttagtcgtgagacacaaagacttggtcatacttgtgaaatcatcctttcagggttcgagcctgagatacctatattctcactgtaggggcatgtattgaccaagcaggctgagtaactctggggactctggctcagtaaactctctcccacatgaggactttggaaaagtgtgttttattcagggttcatctgtttggtctgtagatggtgagcaataccacagagagttaagaacatggcttctgaaattggagaaccctaaatttaatttctggctctactgcttctttgctacgggccttgggcatgttacttaatcacatcttaaagtggaggcagtccttgtagtgttgctgtgtgatgaggtgatgtgctctccacagagctaggatacagtaggagctggttatggcagtcatgatgatcatagttgttgttattatctccatcaatgtctccaagaacgtaaactctaaaagggacaagaaggcaggtccacaggtaactctcatacaaaagaacatgagctaagagtaaatgagtaagaaagagatgggcttactggaaccatggaagttgagcgaggaaatgaataagtcgcagcttatgggagatgaaaaagatggcatctttaccaaatcttgaaaacagtcttaggatttcagtaaataatgatggtgaacattacaaatggatggactggcctgcttcaggcatgcaggtgcggaagtgcagggcaatttctgggaactgtgaattctcccacagttcagaggaaatgggaaatacgtgacatgaagtagaggaagggaaggccacaaagcctagagctataggctagagcagctcttagcaagccttccttcccaggctgaaggatttaaaattcctttgttagactctcgagactctaggaatattttagcaacaagaggctcagaggctgatgcagtgtgttgacgtgtgttgaggtcaggatgtcgtctgtcatgggaatggaaggggaggctgagggacagacggacagtggaaggaagaggacttgataactaaattgggctcagtgaagaccaggaggctttggcttaactgggaggattgtgagcacagtcagcagtggtgggaatggaggagaagagcattaagttcagttttgattgagttgagtctgcagtgtcacagaagagtcaagaaggatgcaggccaagaaaaaccatgggatttggtgactgggaggacccaagagtatttcagaagaaggatagaggttgtggggaaaggaaatgcatggatgtatacatggtgctgagtgtagatgtgcctttctagtagtctggcatgaagggagaggaagcttagacatgcagtttgtttgttcagcaaatgataagttgtacagcaaaggagattgtcaaagtgtaaggtagagatgactctgcctcaggtctgtgaaagagtggaaagatacttcatttgagacagaggggcattcaggaaggagtaacaacacaaagtttcagaaataggagacacttcgtacaagcgcctgccctcagacttctcagtaaataggaaatttctgaagtcccaatgaattgaagacttaaaaggaatggaaaaggtttgaaatgactgctttgggaaattgaatggaaagagtggtaaaactgttgaagagcagggagaggccggtcacacttagatcatgtccatctggagtgggccctgatggttgtggactgtttatccctgagtgaggaaagatacagagtcatagagaacccagagttggagatgttcaagaaggcatcgtagaaggccaggaagggtagcagatatgctaggaagttctctcggaggtctgaagtaaggaagccggcaatgctgaaagacagctcctggtccaggaggtggaggaggaggagttgaagggttggcagttgatgttcaatgggagaagttggcagatatggaaagtgtgttcaagcgagaccatacttggaacctagaatcagtagataaattatgtgctttggatcatcgctctcgtaatgtgttagttaatcaaagttacaatcccaaatcatagcactctgagaaagcgtgttctataatgaacactttacatttttctaaacttaaatggttaggtactgtcattctgattttatggaagtgaaaaccgagtgatagattaaaatcacttggcatttgagattagaaggtaggaacagcacctcagtcctaaccaaatgtcttgttgatcacattttactggtctcttttggcaacttctcagctcaaagagaaatagaaaagggaagtggcttttgttgactatcactacgtaccaaaggaaaaaacttccttttttcttgcagtatgttgggaggtcatggcataactgctgtgcaactgcatcgcaacagtactgcaagccagagctttctggatggatcagaaattgtattcatggcttctttgggaagagttattaccttaagtttcacaagagcagcttttgtgtgggttagatgctcttgctgtttcagcctcgtcttggtcaggctgcagtgagggttacactggggctggcccgactgatcttcgaataggatgatgagttgtttctttccatcttaaaggctttacttcagccttcaggaagtcgttagtaaaatcttagtttgtctcaatctctctctagttcagtacaatggaaaagtttcttgagaatcagaccagactgctggggaatgaacaggaagaaggaaacaggaacagaagcataaagacaccaaagactaactttacttatttcagaattggcccgaaggtagccctaaatccagaagtttcttctgtgccatggtagagtgagggtaggccctggggaagaggacttagtactggtacttatcatgaccagctcatgcagagaatgagccttgctttctttatccatgcagtagaaataatacccacttcacaagttgctttacatattcactaaggtaacaaatgtgtgagtgctgctggcatggtctaaagcgggttgatcatcttacaaaccatttgtttcttctttaaaatgttaaaggtttgtaaggaatgcctttggccgctttatggaggactggagtggggagggtcattttcatgtttcatgcctttcctttcttcctaaaaacatgtccgaaagttcacttaagtaatagaagtggacctgggagcccgtttatttaagcaatgttatcttgaaatcaggaattgagaaagaattcaaactgcaggaagatgaacctacactacattttaacgcatgcaagtagggaatgggatttctgtcctacatttcttgaaaagcagggttgctgccctagattttctgggacagccccagttttggtgctgcctcagtggcccacaggaagggcatctcatcctgaattaatgttatgttaacagaaggctctgtgttacttactgtgacatcctttcattgttggctgaccgacgacctatgggacaaacataaaatgcagtcagaatttttagattcatgcaagcggaggatccttgtcacatctttgtgaaaggtggcttcactgcctacatcatacagctatattaaaagatataacaattcattttatgaaatgcaattttaaaatatttttactgatactgactctagccattgtgctgattgagataaagccagggacaaaggttaaataagcctcctttaagttacaggaagaaggaatccctttaaatgccccatactctggtgatgccgagactgtgcccgtcggtcacagtgctgaatttctgtgacttctatcaaagggcagcgtctgccctggcagataatacctatcatgggtacgttttgatccttatatctctggagagaaaaggaggaagaaggggaaggagggagacaaaaaagaccgacagagcgagctaatatcaaagaagaaaagaaattactcctggccgcttttaaccattttgttttcttctcttctgtctggggcattaagacttcagctagtccccagtcgtcttttccccagtagctttgcttttctggaattaaagtagcagaagaataaagaaaacaggcgctggatgaaaggagaacagacttctttggtagaaatgtgacatgaaaagaaaacccagggtttctaggcttctgtttcaatccctccagcacgtattgcaggtagattgaaaaagtgaagtctaggtgatctcacaatttgcatttgccactgagtgcatgtctaggctgcctgtctaggctgcctgtctagaagcctcacttgcctttttatttgcagccagcaagaaagagatagctccccactagagatgtcttaccatcagtcacccagttgtaccactctgggctaccataccgtgggggcattaggcaaccagtcctttggaggggacaagtccagtttcctggccagaaggagaggtgttgtcaacagggtgacgctgttagttactctgaaactcacacacattgcctcagagctgccttagcgtgacctacctgcctttccttgctttcgctccagagaccccagataatcaggcattcgggttgaaaggtttacttgctgcctccttcacactctgcttctaatgaaagtttaaaattaaccatagttaagttgtattttagaagtgttcagaattctagcattaattaaaaaatcatgacataccttttgaagaagtttattatcttgaataattccaaccatggtgaaacgtgaaacaccactagcataattagtactgctttttgtatcttatgttagtagattcttaaaagactgaattttcatccttggacatacagccccagattctaacctcatcataatttcactgattctgaggccatccattctcctgcttcattatctaatattgggtgggccaaaccttttacgagaacagctcacaggcatgccagagcgtacagccatgaataagtacagaataatcattatgatcttcgaaaccattggaacctaagaagggctggaaagataattgaccaaaagggaaaaagtggaaactaggctaaaataagatgatttagcgacagattgacataggtttatatattctgaaaatagaaatgatgacgataatgtgttgggttctgagacagtcgggagaattgaagatgttccgacccatactgagaaattccgtggggaatcagtcagacatgaggttatctgagtgatgtatattaggtataatactaaggaaatttgtagtgaactagagctcttacctatgttaaagaatcaaggtcttcaaatatgtcttcaaatgtttctacatttgccttgatgagtctttgttacagagaaaggaatgcaggaaaaaaaggcatgtgtgagctggtggattatgctgtacaggaatttgtcaaagcctgaatcacatagacaaacacacacacacaaatggcaagcagagaagaaagttttgctgtaaatggaaaaaggggctagttagctacactggggaatgctgtaatggtaaagccaatgggtcagacagtggagatggccttggaaacactgcaggaattggtattttggatcagtattcttttcattctctatgtaagtgacagacatgtttctaatccagtatccacattcaggtattaattcacattggagaaacccataagatacactctggacagtgatcagtttgaagaataaaggaatataatttctctatttctactggaagatcataaataggaattagggagaagaattaaagggctgagagaatatttactcaccacactatttaactgacccaccatctgatcattataaaatatgttgggctttattgcttatgtaggacaaattctgcagctttacccgcatgtgggtcaaaacctgtctctttatagtagtcttccagctttgtctgcatttactaagttcatgaattgctgctattttgttgcctttttagcttttggggaaaaaatccttcccaaactactatagtttaatgggaactgcatcctagtcaagtaaagaaataacgcaaacatcagggagggggaggagcagaggaaacaaggccttactcagaattgctatcaattttaatacctccctactaaacattctgtgtaggggatgccttagtaatctgaattttttagaaaggggtgttttttagagagggatatttatgaaagctagtattaacatgtttaaagtctgcccccccgccccaaatgctaaacgttcccagtgatgcaccagacaccaagtgttacggaacaggtaatccaccacttttcacagaaagctttttagctcctaactaggccactgtacctgatattgggaaacgtttttgaaggatatcaaggagatggaggagttccaagggagagcagcatgaatcgcaaaggtccgggaaggtgagcccacatggaaaggtctaggaggttaacttaaaagacctcagagcattgagtcatgagattgaaaagggggaaaggctgtagcaagacattaaaaggagggattgtgttctcaaaaaaaagagagaatatgattgaagttttgaagacgctaaagtgcagagtgaagctatatatagataagttctttcaattaatgctaaaccctgggatactgctgctgatgtttaaaatgttggaacagcaggcaacatgtagagtttgagccaaacttttacagagacgaggtggtgaacttagagcatgttacaaaagttaaggagatggtggggcagctcacccagcagtccccaggagggggcctccggtcagctctcacataggcttaatgcagagcccttttgtaacaatgagttgaggttagggtacccttcaaagccctgggaccgttttaatgttgaactgaatatagaacagaaacgatgaaaaatgtggtgccggcagctgacacagtgtttaccaaagcaccagtcatgtggcagtagatgcttctgggtgcctactgtgtgcaaggcatcattctcagtgctgagaacataaagatgagcaagccatgttctttgccccagaaggagagaaagaattgtctgtagtaaagagaggagagccacaattacctcgaaatgtaaaaccagtttcgggttagccatgtccgttgcacacatgcatgcatgtgtgttcttgtgcgcgtgtgttttctgtttagcagagaatgcgctagagagcgtgatcatcctgtgctattcatataataaagatgaagtgagagaacattagaggaaccaaggccatgtgatggtacacgtctgacgttttttcctttcggttacatgcccgtatctcctctttcccctttttcccctttgtcttcatttggttcccctccctatagggagtttaggacaagaagaggctaaagtttcactgatgagcctttctgagggttctccattaaatccaaggacagaaaatgtacagtcctcttattagcataacgaagccatcagcattgcatcaagcgggtcctcgtacccttttccttgtaatggtgtttggtgtagggtcctgaggaagagctgccagcccctacctgatggatcaaaatccccttggcaccaaagagtgactgatagtgttaaccatcacaggagacatgtatgtatgtgtgtggaactctgacgtgtattttaaactttgcaatagcccaaagttaatttgtttctttgccatttgttttcgaatgggtgtggcattgcttataaaatgttgaatgtaagttgcctaggacagcgcctggcatatggtggaaactgaataaaggctgctaggtagtgtagactagatggactagaaaacagtacagatgcagatgctttcagatgttctctctgccacagagagacctttctgtgtgctttgttcaaagttgacagtgtgagtaaactaccatcaacaaggcgttacttttgggtaattttttcaatgtttatcccagttccttcatccgcttttacatagcctcttgtactgcaagctacactcagttttgaagatggtgggttagcgttagagtggtgttctgtggccagtggaggaggaagcttgctcactttaatgcagaatgtctaagcatcctgcgctaaccattggcaggaaggttatttcagtgagacgctggttccttctcacccctgcacccttcctggaatcaccactggttgcagaagcctatatagggtggctcatttggacgaagtattgttaaggtggttattagaagactcgcaacttagaaaaggaagtaaacatgttaatactagctttcataaatccccctctctaaaaaacacccctttctaaaaaattcacattactaaggcatcccctacacagaatgtttagtagggaggtattaaaattaatagcaattctgagtaagttccttctcatgtagttaatgcagcatgatgaaagaaataaaagtctccttatttttttactttctgtgttgcttcttaaatatactccttcaagtcaggttagcttaccttgggtgtttgtattttgttggcttatgtttgcatgtgtgaattaaaaaaaaaaaaaagagaaaattaggttattaaaaggaggatatgaaccaaaatgttggcatgaattaagaaaaatcagtgaagaaatgttgcttaatttgtacacttccctgcagtgctggaaatggacttttcctttgcatttccatgagtcagggagaaaacagaccagcctggtttcacgttccagacagcatgaagtacctcaacagcaaagaaggaaataggggccttagtttttaaatcctctgtaagatagtcaaggcttctccagtagaaagttaggttttgtaataagggaccattttgtcctttctgttcaggattcaacaattgcttgttgatttggggtgaagatgccatgaactcaggagcgggtgaggagggcctttctctgcctcccattcccaaagcattctccctaaccccatggtggaggctgcggagagtgttgtaggcagttgcagtgcccgtcactctctgggtgaagccagtatgtcctggtggtggccttagaagacagcccctgtgaggctcagtaagccgcagcctagattggaacagcgtgactgcctggtaggataaaggagacgacatctgaaaagagggtttcaggtgtttgcaaagaggtcagatccctacacatgaaacgctgcggccacagctgcagccatgctacctgccacatgccctggcctgcgtcagcgttatggagtaggcaacctggttcggcgcaaagaggaaatgcgcgttctgtgcccagtcctcgctcccctttgccaaccgggctgctgagtgtgatgctccctttgtgaagtggacatctgtctaatgggaactggacggtgaccaccagtccgttttacacaggccaccatacagctgccaggtggcgctggctcttagctgttctgcaagtccagcacagggtgtattcagctctagaggtggcaaacacggggcccttccaccaggcccactccctgcaaaggaagtgcttccgagagccaaggctttgctctaatctctgtgaaggaagaaaaagacttggggaaaggtaatgaataaattaaagacacacttttgtaatcgtatattttaggctttcctctctacctaattgtgctctaatctgtacttaggagtatagttttttaagtgggacatgtcaggcttttatgccacagattaaactccaaggcaaataaatgtgtgacagcttaagaggcgaaaagaagagtcttcgtcaaatggcagagtttgattgtttaacctagactaatcagtctttggagggcctgccacatgtcttccagacggctagaatgctcaggagataagagtggggcctatcgctctgtggctttctccccctgcattagccgcagagctgagtgagtctatgaaaacccattggtcgggctgccctagcaacacagaatgctgtgctgacacatactccatcacatgtttgcgatgaaaatgctgtatttttagaacacttcaaagtcaggaaaccgttaaaccacactgcatcctctcttgccctctggccacttcctccacacccccaggaacattgcccccatttcacagaaaaggagcctgagacaaagattaagtgatattttaagcaaagctgataatcccagggaaaattgctgatcaagtcttgaaatccaacacatccttcggagtaatttttaatgctttcgcttcttttacctaagccatgtgtgttccatatgaccttaaatctaagccctaatattgtaaatggagttcagaagacaacttagtctcccattttctttcctggcattcattcaaataaaaataggcacgtaatactgtactgttaaaaaaaaaaaatcaaagctccacgcacactttgaaaatcttttagaatttatgacgcttattttcttaagtatctttatgcaaataaagatcagaagtcctttgagtttacatcgcttgctgaaggactgtatcttgtgtgtctctgaaatttgcgtgcctagctcggtgcctgacatggaatagccattgaaaagtagctgcagattgaacgaatgaagtaaatgctacctctctctgatccaccactaacttacccatttttacagttactattctgtggagcagagacatgcttgtattcattcttaggacatgtgttgagaaccctacgtgccaggcagtgtgccgcatcccaggaatacaaagatgactactggggcatgatggaatggagtgaggaacatgagggtatgtgtgtgcgtgtgcctgtgttggggagagagcctgtgacagtcttcttttctttcccccctgaaggctctgtgatcctataaaggttaagaacaactgcattgtacaaacagggggaaggagggtcagagttgtccagctcgtatagagtgttgccaggtgcatgctgaaaatcaggtcttaaattagcaaagcttacgtggtgtcaggtaacagtcacactcagccctagttctcaaaatagtcctaaaccaaaaaatgttcactcggactcctagccccctagtcttctctgtcagcagccccaaatatataaggctgaggtgtttctaatgtgaggttctgttagcctgttggtgctcctcagtcactgggggccaaagaggaaaacataataaagagagtgaaagactttctaaattgtaaaactccatacccgtctgagccatgatgtctggttctgtgcgtttcctggtttcggtgaatctccatgtcttgcttagcttttttctaccctttggctaccagatcaaatgccactttcccagaaagcggcaacaagagtggaaggtggtgaacctaaaaggcagcatagggtggtggtcgagaacagggccttggagactgcgtgcctctccggatccctcctccaccaccgcttctgtgacctagactaagggttgacttccccacgcctctgcttcctcatctgcaggatgaacagggccgttgagcagattcagtgaggtcgtggaggcagagcagtgacaacagtgtctggactcggtaaaaccgacaccgtactcagtctcctcctgatgaggaaacccaagtccggaaacatgaagggggcccttccaggctgacgctatctcccagtgacagctctgggtatagcctgccatccgagcagatgagcctttcagtgacaggaagatcagttctcggtagtattgacaataagaataataactagtatttctctggagtactcgccatgcgctaggtcctgtactaagggctgactatacattatcttgttaaaatgtgtcctcacaataatcctgtgagattatactacttatggtgcccattttacagagaagaaaactgaaacttagcaaagtaacacatctaagtatgtggcagcatggaatgaatgaatgaatgagtttatttatttatttatttaaagaccaagtcttgctttgttgcccaggctggagtgcaatgacgcgatctcggctcactgcaagttctgcctcccaggttcaagcgattctcctgcctcagcttccctaataactgggactacaggtggctgccagtatgccctgctaatttttgtgtttttagtagaggtggggttttgccatgttggccaggctggtctcaaactcctgacctcaagtgatcagcccgccttggcctcccaaagtgctgggattacaggggtaagccaacattcctggcccagacatggaatttaaacctaaatattttgttggtagcatccccacttttaaccatgacattgtccttgttcggttccagggtttctgtagcgtggagctgggcacatctctctgcctgctgtgcttgtcaaactgacgttacctctctcatttcggaatgaatactcctctcgactgtcagttgtcattgatgtctctgtattcataccagttagcacagtgtgtggtaaccaataggtgcttaatgtttgttcaagtacactgaattattccttcaacattccttggatttcgtgctcccatgcctgagtcttgccatttcctctacctagaggtgtcatttcttcttcccagttctgatggtttctgttgtggcctttcagcatccagtgcatatgccattgcatccataatggctcttcctcctggacaccccagcagagtcatgtctcgctctgctgaaattcctgtgacgctgtatgcccctctcactgtgcacagtactttgtgccattctgcagttgcatacgcatttgtcatctctaactctaagtgtcttgccttggggctgttttagtccattggtatacattataggacctcatcgaacttagtacggtgccttaaaacagtgaagaacatttcctgatggagagaatgcaaagcattcaagataaagggacattattttcccaccagcctgtatcctgccttgttcttctttccttttcatggcacgttgacatggaacaccccgttgcattcctggttttgaatcagctgatgggcactccatggagcatgaaaaaatattgtttcagctgaagcaatggaagtaagagaatcattttagggtgtcactgtagtgtgaaaagctttgacatttaaaataaaataaggaaggagaaaaacagttcactctgtcattggagtctcttgccagcaagggctctgagccctctgagcagcgtgctcacctgaaaccccgccagacttacagatgtttcgtttggctccagtgtgaagaaccacactgcagttctcaggaacaattccattctggcaaggactgatgtaaccggggagcggggcagcaaacagaaatgacttcataggtcctatccctctctactttcctagatcccgtagtgcacactgcccttttcctttgagttttcatccatcactttattcacttagtgccaagacatacgacccttttatgaggctatgaaaactccacttagccaagtgcatgtttggaactctaagacaatgatatactttgcccctagttgtgatcctagagcttccctgaaggtcatgtgtaggtgaatggaactcttccagacttggattttcttcctttgaggacttggattataacatggaggaaaatttatttttggggatcagagaagaatttgagtcaaggataacaaagaggtatgaagagaaaatgagagtggaagttccaaaggctagtgtctctcacctctccctaccaccccatgttttaagctgccccttttaattagacattctgccagcatacagcttgtccaaaaccaaacacattatctgctctttggttggccctgttgtgttaatggaacagtcttccttcttgtcgcccaatctcagaagctcggcattattcctgactgctgcctttcctttccttcacatccaaatcctgtgaacttgagttttttaatgttcctaccgccatttgtgcattcctactgttgtcacccttggtgccacctagaatatcaaagggtcttttcaacagctcaatggagacataattgatatgcggcaaacttcacgtacttaaagtataaaatttgatacatcttaacatatgtatacacctgtgaaaccatcacaacaatcaaaataacaaacacatctctcacccctgaaagcttcctcatgcaccttggcagtcccttctgtcctggctgccccatgcctcaattactgacctactttctgttgtatgtggttaccatttcctagaatgttacataactgcagccatacagcatgtgctttcttggatctggcttcctttgctcagcctgattcatccccgtcactcattgattccttttgattgctgagtaacgtttcatagaatggaggtaccacagctcatcacctctcctcttgatgagcctttgggttgttgtcatttgctgaatattttaaacaaaaagctgctgggaacatccatgtacaagtatttgtaaagacaagtgcttttgtcgctcagctagacaccttaagagtggaatggctgtatcatatagtaggtttatatcgaacttcttaagaaaccgcctgtttgctaaagggattgtaccattttacattcctaccagcaatacctgagagtttcattccctccacattccctccaacacttggtgtaatcactattcctaattttaccccttctaatctgtgtgtagtggtatgtcattatggtcttaattttaatttgcctgatggctaacgatgctgagcatcttttgatatgtttgattcgtgtatatctatcttcaattcagatcttttgctcattttttacttgggttattgccttattgttgagttctgagagttctggatatgctctttgatcaaagtacttcactagatacacgttttgcaaatatttactgctagtttgtttcttgttatctcttaatattttttaaaaagcagtttctaattttggtgaagccttatttataaattccttcttttactgattgtgctttgggttttatatcaaagaaaacctaacccaaggtcataaaggttttttctatattttcttctagaagtgttacaggtttaggctttacattttagtctttgatctattttgagttaatttttatattcagcatgaattatttattgaagttcatctttttgcatgtggatattcaattgttccagcactatttgtcctttctccactgattgcttttgtatatgtgtcaaaaatcagttgtctgtatatgtgtcagtttatttaaagacagtctgacctgctccagtgatcttatttgtctgtctttgcatcagtattacattgcattagttactgcaactttatcacgagtcttgaagtcagatactgttagtcttccaacttcgttcctcattttcaaagttgttttggctagtctagattctttgtatctcctcgtaaattttaggatcatttgggcagtttttacaataaagtcctactacagtttctataggaaatgcattggatctgttcatcaattgggagaaatttgtcatcttagcaatattgagtcttcaaaaccatgaagtggtatatttctccacttctttaggtcttctttgatttctctcacaaatgttttgtggtttgccatgaacaggaccttgcatatccctagtcagatttatccctaggtgttttatattttccgtggtcttctaactaattttattctatttgctatttccaatcatttgtttctagcatatagaaatataattgatttttgtgtattgattatgtatcctacaaccttgctaaactcattctagtagcttttttaaagagtctgttggattttctacgtaaatggtcgtgtcatttgcacataaagacagttctacttcttttccaatctaagtcttgtcttttcttgcctgcttgcactggccaaaacgtccactatggaggtgaatagaaatagtgagagcagacattattatcatgttcttgatattagaggaagactttttctttacactgaaaagcatgatgtaatgtataggtttttcacaaatgccctttatcaaggacattgtcttgtcttcctgttttgctgagaattatcatcaggaatggatattagattttttttaatgtttttttctgagtctgttgagatgatcatatcgggttttttgtctgtttgtaaatatgacaaatcacattgtttttgtgtgttttttttaagacaggatcttgctctgttgcccatgctacagtgaactgacgcagtcacagctcactgcagcctcgaactcctgggctcaagtgatcctcttgtcttagcctcccaaagtgctggaattacaggtgcacgtcaccacacccagctatattgactgatttggatattgagccaaccttgaattgctgggataagtcttacttggtcatgatgatccccccgctgcacccactgcccccaagatggagtttcactcttgtcacccaggctagagttcaatggcacgatctcggctccccgcaacctccgcctcctggattcaagtgattctcctgcctcagcctctagagtagctgggattacagccacgcgccaacatgcttggctaattttgtatttttagtagagagggggtttctccatgttggtcaagctggtctcgaactcctgacctcaggtgatgcgcctgcctcagcctcccaaagtactgggattacaagcatgagccaccatgcctggctggtcataatgattttattggattccatttgctcaaattttgtttagaatttttacatctgtgttcgggaagaatatttttctgtagtttgtttataacttctttggctggttttggtataatggcaatcctgatctcatagaatgaattgggaagtgttctctcctcttcagtttcctggaaaattgtgtataaagttgtattatttctttagttgtttggtagaattcatcacataagtcacccagacttcaagttaactatgtaagaaggtttttaactacaaattgaatttctttagtacctataggaataattaggttctatatttttctttgagtgcatttttcctttcagataatatgtccatttaccctacgtggtcaagtttattgtcataaaactgtgtataatcccttaatatccttctaatgtcttcaaaatctacacataaagacagttctacttgtcatgtctcctgatactcctggtactgttaatttgtgcctgcattcttttttccctttgtcttaaagttcccaggtttatttgtctactaaagaactagcctttggttttgttgctttttttttttttttttctatttctttggctttcactttaattgttattgcttccattcttttgcttatttggggtctaacttgcttttatttttctgacttttaagatgaaagctgaggttactgatttgaaatctttttttctccaaatgaaagtatataatggtatataattcctcctaagtaccattttacctacatccacaaattctgatatgctgtagtttcattttcattcagttgaaaatacttcctaatttctcttttgatttcttctttgacctgtgggttattcagaatgtgtcatttagtttctaaatacagattgcgcatccctaatccaaaaatccaaactttgaaatgctctaaaacctgaaatttttttcagtactgacatgatgttcaaaggaaatgttcattggagcattttggatcaggaaagggatgctcaaccagtaagtataatgcaaatattcaaaaatctgaaagcaaaaatccaatacatttacgggcccaggcattttggataaaggatctcaacctgtatttgagaggggtatgggagttttttctgttactgatctctaattaaatgtccttttggtcaagaaatataccttgtatggcttaagaactcttaaattcattgagacttgtttgatgccccataatatgacttatcttggtaaacagtccatgtgcatctcaaaagaacaggtatcctgttgttcttggactgagtgttctacaaaagtgagtttgattgagttgtgttctgcaaatcttcagtatctttactgattttctggatattaatacttgttctatcagttattgagaaaggctattgaaatctcgtgtatttgtgtatttctcctttgagttctatttttgccttatgtattttgaagttctgtttttttgatgaatagatatttagaatttttgtgttctctttgtgaattgactccttggtggttttgaaatgacctttatttctgggattatcctttgatttgaaattattatgatattagtatagccacttcagctttctttgactcctgttaaataatatatatttttacattctctctcttcacgtgtatgtatctgtctatttaaagtgcatttattgtacacagcaggtagtcggatcataatttttttgaatccactcagacaagttctaccttttaattggagtgtttagataattaacatataatgtaattgttgataaagtttggtttaggtctctaatctcactaaggtcgccccccccccaacctgttcttcccttttgcctcttcttattacttcaaattactttttcattttaccttctttgttggcttactagttatagctcttttttgttgttttagagtatttgttacacgtctttatcattcaagtgatagtatgcaacttcatgtatagcatgagaatctacttccatttctcccttcgcagactttatgctgttgctgtttttacattttgcttttacatgttaaaatacatccacaataccttgttacaattttgtttaattggccaaatttcttttatagatatttccatcataagaaaactatctcgcctgtttatgctcgtagttaatacttccgtgctccgttcctttgtgtagatccatatttccttctggcatcattttccttctgcctgaaggacttcttttaatatttcttgggcagccaatcatctggtggtaaatcctttcaccttttgtgtgtctttcaccttttgtgttttgccccttttttgaagtatgtatctagatctagatatatatattttttgagactgagtttcgctcttgttgcccaggttggagtgcagtggtgcaatctcagctcaccgcaacctccgcctcctgggttcaagtgattctcctgcctcagcctcccaagtagctgggattacaggcatgtgccaccacacctggctaattttgtatttttagtagagatggggtttctccatgttagtcagggtggtatcgaactcccaacctcaggtgatctgcccacctcggcctcccaaagtggcgggattacaggcgtgagtcaccacgcccagactgaagtatatttttactggctatagatttctaggtggacaggattttccttttctttcagtatgttaaagacattgcttcactgtcttctcacttgtattgtttcagatgtcatccttctccttctgtttttttttcctcagtctgcttttaacattttctctttatgtgactgggtttgagtaatttgattatgatgtgccttggtttggttttctttgtatttcttgtacttggagttcattgagatttttggacatgtgagcttacagttttcatcaaatttggaaaactttcatccctttcttttgtcagatatttttaatgtctgctttctctcaactctccttgtagactcagattacttgtatatttggccatttgaagttgccttacagctcactaatgtgtttttttcttccttttttaaagtctctgtttctctattccattttgaaacacagttcactcatcttttcttcagtgtttaatctgccgttaatcccatccagtgttttcttcatctcagacattgtagtttttaatctctagaagtccgtttcggatctttcttagatcttccaggtctctgcttgtcttgtggaacataccaaatacagcgataaataacttttttgagtccttgtctgctaattctagcatctgtatgattattttctacttctaaagtgaggcctctcctagtcctctacccaagaccgtgaattgtgagtattttcggtctggctggtaaggacaggcactattccaagcctttcatctttttggagggctctttgtctggtagtttcttcactcatgtgcattgatcatcactggatactcaagagggacctctgcagatctctttgactcctgttaaataatatatatttttacattctctctcttcacatatatgtatctttctatttaaagtgcatttattgtacacagcaggtagttggatcttaattttttttgaatccactccgacaagctctaccttttaattggagtgtttagataattaacatataatgtaatcgttgataaaatttggtttaggtctctaatctcactgagggtttttttcccctcacctgttcttcccttttgcctcttcttactactctctctctgcagctcattcctctttgctactctttacggtgaattctaatggccctcgcactctcagctcagggagtatactgggtcctgcctggtgtccagctccctgtgctgtggcctggaaactctttcaggccatgagctgttttcaggcaagaggactgtccatctaggccagaggcagaagtctgcaactcttaattatatttcctgtccctggttcttttctcacagtgccttctatttatccagaggaattccagcaccagcgatggtatgcaaacctttagtggcacacgttgactcagatacagcccagattccttggccatgctttccaggtcttccataaaccattctgttctttctcctctcattcccttcattaccttcatttccattcctacagatttgttaactggaatttctgtacttccatctctttttgttgacagcttctctttgttcaggttctccatttcctgcacatttttaacacatttgcaagttgtaaattatcttctttctgcaaactcctgtaaagatttatgtgcacctctttgattcaagccttcactttctaccttgtgttaacttatttatgcacatgtcttatctcctccaaccacttataaatcccttgaggacaggattcacgtctcatttacatgctcttagaaatttacagtgcgtacacagtaggcaatccatacatgcccattcagtacacatttactggcagtcttgggaatgaacatcaaattaggtattgatgaaattttggcccgatgataaagaatatcttaggctaaaagtaatgggaaaattaaattgtttgcaggatgtttcagcactactccctacttagctagatttatctcctctttcttctctgtgtgtcagtttgcaaacaagaactgcccttttctctttgaaaaaaaatgaacactaaaggcagagattttcatttggctgtctttgtattcccacaaccaagcatggtacgtggttcaagaaatggctgtttaatcacagcagtaactcccagtaggaaagattctcaaaggaattgttcttttaaaaaaaaaaaaattcacaaagtaggctgtaccctcaaagtgctaaggagagcttctgtcctcgaaaatctccctgaaatactgaaagcatacaaaaaaggagaaagctcaaaactaaattttgactctcagtggctgggttttgtatctcttttctttaaaaaaaaaaaaaaaaaaaaaaaaaaagccattgaaatgattccacttctgagttacctggagcagtcaaattcagaaagacagaaaataggttggtggttggccaggggctggagcaggagggaacagggagtaagagtgtaagggggatggaggtttagtgtggggagatgtgagagttctggagatggacagtggttacagttgcacagcagcatcaatgtatttaatgctgctgaccttcatggacatcctggtcatgtgtacagaaaacttagaagtaaattagggtttaaatccagttccctgaggttgggcaagctgctggtcctctctgaatctgttttcttgtctgtaaatggggcctgatgtattgaaaggcacctggctcagtgcctgtaacaatggacactcatgttcatctagttctgtcccttttcagctttacagagaggcttcctacttagatggttctctctagctatggggcttggagagtaaatgggcaggagtgggagtgtgggaaggggccatgctctgttgatctcagccagttgaagctgatgcctctgtcctggtgtttataaggggctccatcacacatgtacccgtcctctattgtgtgggaggtaccccaggcaatgaaacggagaggtgtctcctggtgttgcagtggggaggagacctctggaccaggacgtgctgtggggcgtcagctaccaaccttgtggtctcgggaaagtgacctatcaagggggcatacaacagggacaccaccttgaaatctgaagtcactgagtagcaggggaggttggagcctggggcaccccatggcctgcccttgggtttcatttaactgtggcctccccaggatgttacacgtcctggcctcctccctgcagaagatgaggcttattcccagtcggcagactggacttcttcataagtgaaaaatagttacataatggttatctcattggtgtttagatttctgaacaaaacgatgatccaaaatctgagtgtggagaaacggatccccagtgaaggaggagggaggggccgtgtgcatgctcatgctgtttatcccaagcctgttttccaccctccctgccctcccatgcagaggccccgccctgtgtccactctacttcttaggaacctggcaaccccagggaattttcctgacaagtcagtgtcattttatgggttattgctgttttcccagaatagccaattagtattgagggagtgtcacctgctcttctccatgttcagccccttcctgagcacactcatcaggtttaaggagccagctgtcccacctgctcagctgtgcacccctacaggctgggatcttgtgagattcatacctactgaggagggtgcttgcgttcagtcatggttgagatggggctcttccagcacagccccaaaatacttcaagaggcgcagaggaaactcggcctcccgagtgagcatccccttgatcccagcaaggctggagggaggcagtgctgtgggtagttagttggaggaaccaagggcatggcctcttttattctagtgacattcaagggcaccagctgttttgactcccaggaagctgtttttcccatgctgagtagtctcatggcactgtgtgccaccacagtgctgcccagccctgccaccctggactgaccgatagaggggagaccacagcgtcagctgctaacatggaaggacttgattgtgcaagagctgggtttcctgggaagtcaggcaccctgctccttcacctccccataacagctgtccccatggcagtctcatgacaataacaagccagccttgctattttggaaagcagtgagggacgtggagatccgatctggacagtattcatctcctgtgtgacctgggtgagttgcccaccctcacagagttcttttcaccgagttcacatgggactcaaatgggatgccatggttttaacccctggcgtgcgttagaatcacctagaggaattgaaacagagaaataccagtgtcccaaccccaccctcaggaatttggatttaattcccctgctgggtcccaggtggcacctgaaggtattgaggtgattctaatgtgcagccgaggttgagaaggaccaagctggacgttgcgagagtgctctggtaaatttcgtttggtgttactctcattacattctccactgactttggcagtgtctgtgaattttcacatttttcatgtaaagatcttcatgactttttttcttaacattgtttccaacaactactgcaggtcatttagcaagaattagtcatggtagttcacagccctgaacccaaacacccccagatcttcagcctcgcgtggggcttccagtgacttcgtggaatgtcatcatagtccttcctttggagagctggattttctcaggcaccgtgaggatctgggccaagcttctccagggctgtcattgcttcctggttggaaaacccctaggtgccaaatgcaagaggagaaagagtgaaattaaccagctcacccatcaatagcagtctcaaaatcatagaactgggagcctgtaagaaatcacacatttctgtgaatgtgtagagaataactccaaagtttcaccgtgacaagtgcagaaattacatttaaatgagtacagaagaaaatttcgccacaaactgtgttagccaaagaaggttctgtacaatgagacgtaactgaattatgggtaagttctgtgttcctgctgatgccctccccactccgtctggggctggggctgtcttgagccagcattcctgttcattccacctgaggactccagtgtgtgggaaggaggaagagacttaaacccacctaggggccgggtgtacagcagaaggatagtacccattgaggggccaatataggtttcgtagtgagaacataataatgcaggtttaaccaaaagaatgtgatctttgaagactgtttgatcttatgcatggtttatggtattttgtaaatggaatagcttttccaagaaattcaaaaaagtgcccatatgacgcttcatgtttatagatttatgaagtattggttctcagtataacctgggaaagaggctggggaggtccggtcatcttcattttctgatgagacaactgagatttagtttaaatagtggtcacattgctaggaatttggtagttcaaggacaagacttacagtgttgaaactctcattttggtgcgtttcatgttttagaatttttcacagtatttttactttttaaaaattttttattttatatatatttttgtgacagagtctcactctgtcgccaggctggagtgtagtggcatgatctcagctcactgcaacctccacctcccaggttcaagcgattctcctgcctcagcctcctgagtagctgggactacaggcacacgccaccacacccagctaatttttgtatttttagtagagacggggtttcaccatcttggccaggatgatctcgatctcttgacctcgtgatccacctgcctcggcttcccaaagtgctgggattacaggtgtgagccaccacacccagcctatttttactttttaaattgagttttcattttgaaatgaaaaatgagaaaattcaaaatttttaaatgaaaacattggtctttgcccagtaacgaacatgtgtacacctttgcattcatacagtcccctagaaccagtaagtcctttccctgcaaagctgtcctgaacattcagggtccacacattgaccactgaagggtaggaggaaaggcaaagcaagctgcacaaagggaagatggcccgtagccttgaaatgcactcttgctagccctccccattttggttattatcagcaaagatcagtgacatgttaatatattcggctattttactgtgaatataatggtaaattttaatagaaattgagttagatagcagtttctgaatctgaaagaaagtgacattgcttgcgaatgctcacagtagcacttaacattgtgaagttcaactcaatttttatttgctgtttcacagaaagcaataatccctcatattttatagtaccatctgggttacaaaaatcccgatgcgtctttgttggacaagccaggatctcaggaaggagtggaggggagcttcatctcagtggcttctgccctgaatttgaatttttaacaggcagcttttaagcatcctgtggcactcatcccatctcagtgtagcagagacagtaatgtctttccctctatggttgagaaggagcttttgaatgcccttttggaagctgtagaaatctatgatactcatcgtcagcattcgaccatgaacttaaactcctatcacacctctaggtgtgataatatttctccttctgttacaacagagtaatgtcacacttggcacttttactgtcctcttgcgagactatcctccaagtgctgtctgagagtgttaactgctatttggctcatttttctgcaccaaggagaacagaaacacagcaggcaccaagaggaggtttagtgtgcagtgggttgttctgaaaggcagtgagtaaaatgaggtattccctgacttctgcttttgctacatgaagtcatgaggtccttgaagccagacttaggtaccgtttctttcatcccttgctagttcctaatcgtagacacaaaccttccacatccatccaggcggatggcagtgcttcttgtagaaagcaatgtcactaaggcagtgtcactaaggaaaacaggacaaggcaacagttgtgttcagagttttgactggcgtctgattggaattagaaggaagattattttgccataacctaggtaccgtgacccaagctcttttggcagaccttgacgtcacaaaccgtacgcttgctggagaagggaaaaggagagttgcagccactaagagagtcaaggctgtggcctgcctggtggtgttttataggaactggctcagggaggctgcatgtcctttgttttctgaggccttgttccacgtggcctcccacttgaggccaggaatattgcagcaatgccgaagagtgggtggacaaatagccttattattaacctaagttggaaacatggctttttgagtgtcttcattcacagatgcagtcacaaaatattaatactctttttttgaacatgacaaaacaaagtattcatttaaacctcctttgtccacgtccatggtaaaagagcacctcaggcaggggagaaaaaaaaaaaaaactggtcccttgagaattactttatcctttgcatttgcatatagtttgaattcataattaggctatttttattggctagcagctgtattatcatataaatccctgaatatgtaatttggagtcatttagaccagtcgtcccacagtaaccctgggaagcacgtgagcagcgtcagcgtctttctcgaggaagaaaatgaagatggggagtaacttgctgcaggcagcttagctcctgctgtggtggattgggtttttacgctaaagaacatagatacctgttcagtaataacttacattggcatagaattcatctattaacaggatgttttgaggccagacgtggtgactcacacctgtaatcccagcactttgggagaccaaggctggaggatcacttaagcccaggagttggcaagaccagcctgggcaatacagcgagacccccagctctgcaaaaaaaataacaaaattagccaggcatgattgttcatgccggtggtcccagctactcaggaggctgaggagggaggacagcatgggcccaggagtttgtggttatactgcactccagcctggcaacagagcaagaccctctctctttaaaaaaaacaaaacaaaacaaaacagaaccgggcgcagtggctcacacctgtaatcccagcactttgggaggccaaggcaggcagatcacgaggtcaggagttcaagaccagccagaccaacatggtgaaaccccgtctctacaaaaaaatacaaaaattagccaggcgtggtggcgcatgcgcttgtaatcccagccgctcatggggctgaggcaggagaatgacttgaacctgggaggcggaggttgcagtgagccgagatcgcaccactgcactccagcctgggcgacagagcgagactctgtctcaaaagaaaaagaaagaaagagagaaagaaaggaaggaaggagaaagaaagaaagaaagaaagaaggaaggaaggaaggaaggaaggaaggaaggaaggaaagaaagaaagaaagaagaaagaaagaagagagaaggaaagaaaagaaagaaaggaaagaaagaaagaagaaagaaagaagggttcccattgttcttgcattcattgtctgcgttggttgagtctgtaggcagggtagggatgagcatcttcattttcttcattttacacggaaaagaaatctctggttgaacgtggtcagtgacttgcttcagctgggagacttgggactgaagctgccctctgtgactctgcactctgtccgtgataccagggaactggtgaatccaggagcctcccattgtgatgctcactccttctcctgtccattcatatgggtaaaaaaggttttgtggcttaagtagcatccagtttcatctcaagtttcagttcccataaaataaacagatactagggtagcaaatggtcccttattaaatgtcacaggggaaaaagagaacaaaaatcattttctgtactctccagaatacagttgagtgtcccgattgcctcatacctccagtgagaacagcagcagcatttatgggctatctcagtgagccacttttctgttaaacaatccaacacggaagtaacacaggctgtcctttgggctcccccgcctgatccgctgaacagaatctcagttctgtttgacttacacggtcggtggcagagggaggagggagaaactcttccatctttattcccaaatggggatctcattttgggtgcatgtatgcaaaatctgttctgtctcctcatgcttagtgtgctagtatatatttactgctgactgcatttctttatgaggactcttctgtagcgttttgatactgacaattttatgaaggctatttcttgatatttgtttattactcctttaaaaatgtatttttgtggcagcttcaaggcagttgcaagatagtgtatttttcaatagagaagttggattaaaacttacagcaactgtcacctggtaaccagaccccatataactgtgtcaacattaaccagtgatttattgctttaaattggaatcagctgatttgtggttccacggcttttaacgctgcaggattaatctggaacccactggtacacatgaaatagttgtattatctgctgttctaagactgatgaaatgtttaaaaggatagctgtgtaatcagtccattatctcctggtgttccagcttattctgttccgtgtggcagtgtacaatttcaaaaataattattctgctgtccttaatatgggagccgaatgcagtgactgataaaaactgcattcagcaagccctttcccaaattgggtagttctattttgttatcttctgaagggaaaacatgggttgtgatggtcagacctcctaggagtctggaagctttagagcaagccctgggaggcagaacacttaatctgttgccaacatctttttctgtttaatattttgaattttttgtttgtaggtaaacttgtttagactacactttcatgtactcatctgaacataggtagacctcttgaaaataaggatattgatgcttacagttttcttttgttctgaaagcagtcagaacatagccatagttacagaatgtgggttttaaaaagcaatctagaccagtgtccctttcttagcatcctactttgacagccagctattgaaggagacccagaagggcatggtcaagtggtttgcttcagacttgcgttctgtacaaagctcatccaaaggaaaagcgttgtagatttttttgcatagactaggtagtctctagggataattattcttgtttacaaagatgttcgtggcaatctatagactgttagtgatgttttgaggaaaacccaagactcaacatcttgtatataaaggattgcccatgaaatcacagtctgtcttcaaactgtaagtagaacatgagctttccagttaatagggaaaacataaaacaatggattttattgcagggcagtcctggccttgtatagaccaagagtagttgactttccaggtaaccatggataccttaggaggaggggttggtaggacctgagaggaggatggcatacaattgtatgactgttctctagtggcgagagattgtcaaggaagaaatgaacagttttattagaacccaagaccatgatctctgggaccaacatctttaattggagacttgttagaagccattcagttaagaagacagtatgagatgcatcaccttgtttctgcgatgttatcttctactccccgattcggttgctggttatctcttaggcctgcttttcccccctcttgaacatggagctaataactttcaaacaaatcttgagccctctaggcagacactctgttgttccttgagcccgggccatccttgctattgctacctgaccacaagtgctggaagtagatgtcacacctgcgagcagagaaggcccgcaggttgggtatggtctgtgtagagcctgaatcagaagggtctgggctggaaaggaagatggtcagatgttgccctctgccaccaccccttcccccaagtgtgccttctcttgaaaaatgtggtaaattccatgaaattcatttctagtcacagttaagagcaggccctccagactccactcagcttgtctgttatgaggaaaaagccatcaatattttaaaagctgctgagaggcaagaagttagcctcgatggctggaaattaagaattttttttattctatgcaaaatctgtccattgcttctctaaagcagcagcagggctgagggaaagcttagcctagaacagggatgtgatgaagactaataagataaaaccagtcagagtgtttaagctagaggtaacctggaagtgtcctaattggatggcctgaatttctcacccgggagttttccagagcagttaacacccagatatgccccggcattgatgtcacaaaactgggtcgtggcagggtgctccagagagtagatttcagggcagatcttccagggacagattttgttgacacgccttctggatttctagttgtggttgagaatgtatgatgtgaaaattcacccaaactttccagagttcaacttaatgagaagagaagaggtttaggggagtgtattaactctttgggcccactagaggagttttacaaatagttttcaagaaccagttcgcccacatgattttcagtctgcctacgaatttgttaggggttgcattcatatttataggtaggtatctcacattcagcctcacctttgcctccattccgtctattaatttttctttgttcccgtaccaaaatgctaaaagcctaagagcatgttcttacagcaaagatatgaattcccaaccaagggagatgaagaagtgaattggttaaatgtactgaataccagttctctgtcttttcatagcacatccctttgatatttcttatactctgcagaatgtgggcatgtgcttattttcatgaatacctggaaagcattttaaatgatggcagtgctacctgggtaccaagaggacttaaatgccacttgctggctcatgacttacccaggaacatggtgcagggtctccctcttttccttgcccagtgggcacagatctctgcaagacatttccaggtcagacttctgtgcccctctgcataggcctgcctgtcatttgatgctgctggtaggttggagaagcagtccaaggggatggagataagcctcagctactgggtcagcgttttgaaacctgctagcaaaaggaagggagaaaagattgagaaaaagaagacagaaattaacttctgtgtcattgtgggctgagtcgcaccgtacaagttgttttccctctgagcaaatgaaatttgagaattgttcatcagtgaggatgaaatgtcagatattcttgtcgggaagtatattcctctctcaaacgggtcagttttaccaagtggtttgctcaaaaaggtgttctcatcaagaaagtgtaaatgtgggtttcagtgcttcaatggctttgtctacctgacttctctacagcagttcaccaacttctaattttctgaaacgaaattctaaaacatactcactttgatcctgctagtacatttttcttgtagctgtgttgggtagtcccctgaagtgtgaggcagagatagcactgacatgggcagaattgttactgtttcacctgtattttccttgtgtgtgttttttaatctgtaggtattaggataggtttaactgtcagtattttcgcagacccaaaaatatattaggacttttaaacacagaacccttatggatattggtgggtggctttcctccatgtggtgatgcagggatccaggcttctccatcttgtcactctaccatctctttggtttttgtgtgtgtgtgtgttttgttactttttttgtcacctgtgtccattcaaaaggagaggaaagaaagtatggaggactcatatctgctctgttaaaagctctggctcttaagcagcacaggtcacttccacttgtatttctttaggaagcctttagtcacgtggcaaggggcaaatgtggtttcaccatgagctctgttccagtgttggccctgaggaaggagaggatggacttcagcagacactggtagtccctgcaacagctgtcctttgctgtgttgtttcccaggcttcctggaggataagaatcccagggaacactgccctatagatgaccaggcctttcgcctggaaagcctgagctgaggggcatggcttggctccaagaatccatgtttttgccaatgttccaggcaattatcatcttcaggaacatttgggaaatgctattgtaagaggtgattagattgtagaaaggtatttggtaccttcgttgcagttttctgctgagaatcctgtgttgtaaggaatggtggtggactcggtggtgaaacgttaactcctggcacccatgcttaactctcttcagtcttaaaatttggcctcactgcatagacaagatcatgactgtaccatgtaacactaagacatctgttcctacctgaatttttcttggagtagcagattgtttcattgagttgaccaagtttacgactcattttgacagatggtgattctatggtttatatcaactacttggaatttatcatctaatgacagctgtttaacacataggtcagcgtataagattgactagtaatgaaatcttcggggcatttttttcacctcctgtcataatgttgaatctttgggaaacctaccaccttggaaatgaaaagcttataaatatattgggtgaacagcagttgaattatttatgtgacaaaaaattctttgtcatcccaaaaagaaaggatggaaaagttgtccccgatggtttcggaagctgcagtgagatggacacagtatgtggagtatctgtggggtgagcttttcgtagcaaatttggatcctagactgccctctctgagctacccagtagtcagtcaaatgggtcaagtccttttccacagtttggaatgtgctcagggaatcaaaccgactttaatattagcctgtgacagttatattcagggagctaagacttgctctcactaacatcgaaagcgttccagcacatgttggaaaggtgtttggggtagccactgtttagacttgccttagctattgatcttcttgttatcgaatataatttagaactaacagtgagacccttagtggtgggagaatattattatcatttgttatctgcacaattaggaagcaggagagtacagcagaggctttatcctataaaccatctcgttgcctagagcattttagctccttgcagagtggtctaccacatgcctgccttcccacccccatcctcatctctctctctctctctctctctctctctctctctctctctctctctctctctctgtgtgtgtgtgtgtgtaatccaaacaggcattggccctacagtccaaagggctaaaaagactcagaaatccatcctcatccagtcatccagggaagaaataggagcctgcagggtgtttcttttcttttttctgaaggtttaatagaatcagtgtcattggcaatgattgagaaaaatgaaagtttttagatcaaatactactctagcgtgcatgcagcatgggaacaattgatgggcggcgtgctcttcctcagacaaaacccagtggctgctaatcagtgtgtggtgtggagagttttttgttatcctgaaatcaaggaaatattttacttttccctctgaggtgttccagagaaagattcttgatcaaagaagataaatcctcttcctacctgctaatgagtgagcagctggatttcaagcacatcacgtacaaggaccatgtgttacatttttttagtatccataatcaggtacacttatttaattttctaaaaatggaaagccaagcattctctttggttagagacatggagcggtgaagaagtaaggcagtgtttggcaagatgagtccacctaactggaatcaggccaggctttatcgggaaccagaggggcgactctgtcaagacaccccctctccatgcctccacttctttaactggaagcaagaacttaaaccagatggttaagatcttttttctgtcttccgtctggcatttaaagttgatcgctgtcaaatccagaatggacccttttcagaattacaatgtgactgaagtttgtcactttcttcccagccatccccattttgggggtcatccttcttcttttaggacatcccctcttgccccatgacccgcgttctcaccatggaaactcttatcaaacctagtggccataagattcattgatactacagcgtaaatggttgggaaacagattgcggtgttgtgtcttctgaggcatttttattttaatatgaatctgagcctccaactgaaaggatgaagctcagaggctgagtggaaagactgggggagaggacagaagaggaggggcgcagagggtttgcccacatcagccccgttttcttcttttgtcccagaatcatcgttaacattatcccctccgctttcaaaagggtcctcacttggagaatgaattatttgatcaccctggatatcaagaaacccttcatactgcccctaaaattgtacagtggaaggaagaaaagaagctaacctcttttcggtattttctttgtgccagattctgggcttggcactgtgtatacattattttactaaatggatcaaacagaatctatttcacctagccattaaacagcatctctcttaggctagaagtaactataccagagtcatttcacaggaaatgggttgagagtgttgcatggaccatttttacccctaggaacctgaatcagaaaggctcatggaactccaagttgaaaagaaaaccatattgctataggggaagggggtgtgaaaatgctccggtgagagtcaaccccctgagtatacagtaggaacctccggtgcctggcaccacgccatgccttgtcgggggccggtggggggacccaggaagcgtaagaggtagcagccacccgcagagagctgcattccttaggagaacaggagcacggcagcggaaccacagtcagacggcagtgatctcctgcgcttgatccccgtgtgacaggaactctcaaaatgaaatccagctgctggaaaccccttggccaagaggtgcctgacacacatggtggtctgtgccccaggcttccgccggacatctcctcctccccgtcctcatcgcagcgtttaggacatcacgtcttcttgtgaagcccagtgttaactgcttttgttttttcttcctctattgttgctgagataaaggaaagtgaccaatctggttaaactcgtatagtagtgaaacctgggtgtgctccttagccgtaggttttattttaaataacaaactgttttagggattttttgcctcttgggggcatatcatagagcatacagttggggaaaattttgttgtaccctgaataagaaagtcatgaaaatgattacattaaaattgattgactatttagaggtcacgtaaatggatgttcagagtattcaaaggccatgcgaatgggtgaactctgctagttccaagtaattacttcagaaagcaagacaacacaatcaattctaagccctattaaagggctcgtggtcatcacttagaaaagcggcttccctaccagggaagcacagcggcagcgcagcctgcggcaggcctgtcgcggctgcatttccgtattgcatttgttataaaagtggagtaaagctacctatcccttacctgcctcaaagggagcctgcatagtgtctgttagggctcagcgctctatggagaaacatgttaaatttaaagtggacaatagctgctaacatttactaagcactcttatttacatgccaggaactgtgttaaacattttcatacgttgtttggcttaatgtgatacatctataatatagctgtcactaaccccatgttattaagaaccagaggcttagggaggtgaggtcatcagcttgtgatgctaatcaggaatgactgtaccagcctcactgcaaggattatgaatgggcatgagaagactatccagcatcactttgaaaactgtcatggtatctgccatgagaactcagggaccaccttggccccaaaagtgaatttcttaaatgatttccgctgttccaggcagtatggagaaatatctctgtctctgatctccgtacacatgaaatgcgactcagctattgccggagtggggtgaagacagttataacggccataaatattagttctccagcatcatatccaacaagaaaaaacaatctacaataagtacaaatgtttacttcagcctagccttggatttctatagccaaagggtttgcctctccatttcactttgactgtaaagaccagagtgaggaagtagattatgacgtccttattccatttccagaaaaaataacctttgttctgctttggattgcaaataacccttttgagagttcagaggcacctagaacccttgagtaataagttagaataccactgataggtgctcaggaacagagctgagctgtgttttattcaggctaacaataaggggcctgcattcttagtccagggaattcaagctgatgcatcgtcaaagcaaggcagtgaagtggagacttgagagatcggcctggcctggaagcatctaatagcccagcttgctgtgaattgagaatcgtaggaaaatagatgtgattctaacctacctctcattgccactagcctcctaattataatgctatcctatcctctacagaatctatactatgaaataaccttatattagaaactttcttctaatgaggtccctcagtactttagaaactaaatccttcttaattggattcaagacagaactaccttacacctaccgcgtttaaccccgtgatgcctccttggtgtatgggaagtgatcttggtttggttagcctgaaggcctgcctgctgctgagccactggtctctacctcaccatgagaccccagggagaccagctggccagggagttgagccaattaacgtccactttagggaagccagaccctctagttggcttgttacattcaacctgaagtttttcattcttccttaccttcagagaaaaatatggttctgctcactactttggaattaggttttgaaaaatacaaagcgtgataaattctatggctagcttattatctttcattcctatagtcaagtgacgttttctctaacaaagaagactccttgctttcttcacgtcaccccctgggggcctggacaaatgcacacgtcaccctacctttctgatgctcagagcagggtgggagagttcgtgaaacagctgaacacgatgattgtcccatcgggggaaaaaaggatgatgctgaaattcttccaatgctttcatagctattagacaattgaaatggtttaacataagtgtcttatttcaaagaaccagagaaggggaaaagcacattccagcaattttgcccttgttaccttttctatctgtgtcgtgctttggtggaatttacataatcatgggtgaggaagtgttacagtatacacatagctgtgcatattaggctgcacttgctttcccaagaggcttgaaaatgcagtcaatttaatctaggtcaaaaggaaagaaagaaactccattttccctgcagaaaacagggagcttgctagtcttcacggggtcacggaaataacagaagatggttcctccagggaaagtccccagggcaacaggaggctgccaggggcctggatcttgtggccagttgacagacaggtggtcctagcgtgtcaaatggagagttggagggaaggtatggggttgccagggaccccagtgagatcattgttccctcccgggctgaaaaggtggctcagatttgctgtctgcgaggaatcttgcagggaaagtgaggaaggatgttggtggagcatcgcacgactgcctcaggcggccagagggcggtgcgggtcccacgctgccagtgtaagtttcccaggggaattcctgggatggcacttggtaatccaaaccgtggagtccacataactcacatacggaaggcccgatggcagcatcgcccgtcagcttcctaggcagtggccagatggtgataccgctgacatcagggtgccaattatatcaaactctataaaactaagctaattggatacggtttccttaaaagtagatttctacaggatgaggcgttcgtatttgggtagctgctactctagctatggaagtcccatttttaggtggggaaaaaagggttgtgttaggtgactgttggagagacatttcagatgagaggtttaggttataaagagacattttaggtgacatgaacagagtgtgaagcagatctttcagagtgaggtggaccctgttagaggtggttcagggacattctccctatgagaggcatagactttgaggggtgctcatcgactcgtggttgctgggatggttttggctttgctcttggctcctggtgtgacttgggggcagcctgctaacctgtagactggtgttttcccatctgtaaaatgggagggtgtggggagttaggctggtagaactagtgtagggaccaagagaaaacctccccttggccctatgaaggttcactaagagtccctgacaagaggcacatccacaggagaaaaggcacgcaggttgatgagatcacggtttctgtgacacaggcgccttcgggatgcagacccaaagatacaggggaaatggtatacttaggtccaacaaagtgtgcctaggctcatttgcatacttaggttccacaaagtatggtcagccatgtagtaatgtgattggacaaaaaggacatgacgtaacgctaacagactgagcagggacactcggcaaggcctgcctgtccgcattctccctggcctctctgagcaggattcttccttctgggtgtgggaaggaccttccctggaatgggggtcttatgacctacagtcaaacaaggtaggtcagagaatttgtttctggccagttttgtacagaatgacggaaggaaagttagagcagtatttttaagttttatggctggctttggggaaagggggttctggtttctgtgacctgctatgaggaagagagggattccagtttctgtggctgggcttaggggaggctgggactgagagacaggagggcaggagggggtcagagagaaactttttcttgtgaggcttttatgctggagtactgcttcccgactcccaacgtttgctacttgtaaaattttgtgattccacaggaaaggcaaaggcatggaagtcatgagaaggcaacgctaccttaacttcttctcattttattttttatagtgttcagtttaaaggcgtaaaaggctggaggagcagtacaacacagatatgtctgatcttcttggaggttctccctttagctaacttttgctgtgatgggtacttttttcatgcccctggttcctgtatctctcagttgatgtcattatagccatctgcgttcagcatcaaatacaggggagccacgataataaaattacaggcaggaatacgtgagagagctgagaggcaaggggactgggctttagacggagcttgtgaaatcggtggcctcatttgttcacttgtatctagcactcctagaaagcaagcactgcgtggaggtccagccacaggaattcacaccaacgggcccagagtcggtcatagtgccctgatgtgaccatttcctagcagtgccagttcttcttggtggttggatttggggctaaaaaaagggctacatgggtgaccctccaggatctcatatcatgtcctgaggcctccttgtactttctaagaatgtcattttgtcattgccttttgcctcaagatgctaggggtataaatcaccttctaccacggaaaaaggactactcttttttttttttttttaaggttaatgctaagttttcttgaaaattttaattcaggggatttttgatgggtttttttttaacctttaactgccttgtagaaagtgaaagtagggggtcctggcagggccaaagccagtgactgagagttgaaaccgtagtgcatggcagattcgcttgagcacaaaatgccccacttagatccacagcctttggactctggaaaaaaaaaaaagtattaaattcttctccaagtggctaagattgagggagaaaatagatggcaaggggaatcaagtaagaggagtgtgtcctcttttgacttaaactggcttgcatgctactgacttgacaagaagccaagatcccagttgcagttcgacttgtgtgaagcaggcacctgctttgcttgcaaatgcacatacaaaagagagcttcattcacaggaaaaaaaaatagcgggttcactaatttagccttccagggccttcgtcccttgatctgtcagccccttagaattcaaaggcagcgtgtaaaggaatttcctatttacaacatgatgacttttttgatgtcctgaattcgaatataactcgagttgaagttgtctgctagggctattgctttgttgtttaataaaaaaaagaaaaaatatatagagagctcagtcatcagatgatcagtctggggctgctttcaagtgtttatgtgcttagatttagaaaacaaagtaggttttcatatatgtaagatgtcgaatggccttgaagacgtggacaggcccgtcttgaccctggggcagagtccacttagggagggaaacagctgttctcatgcccaaccccataagctccgaaacggaaatactttttatttgaccagctttgccgcagaattgcaggaaaccatttttcagtttgtctcattagccctcaagttgtatagttattttgtattccagaaaatgctccacagttccccataagaagatattactgaagggtggtatcagaaaaagaattagcagttagaactagaactttccagaaaggtccctcctgccatggtagagaacaccttacacaggggagtttctccttgcttcaggcgggtggctgcagaagagtcatgaggaatgcctccctgaaaccagccttgctacgcggggtcagctcctgcctttggcgttgtgactcgttggcatgtgatctgaagttcctgccctgcagctgacgagccagtgtttcaataattaaaaacaactcaactcactgtcctcctgccttgaatttgatcattgcgctttgcatgtatgtatcacaataccacatgtaccccataaatatgtacaaagattatgtgtcaataaaaaacaaaaattaaaatcccaatttttaaaaagaaaacatgaaagtaatttttaaaactgcgtcagccatgctcagtggctcatgcctgtaatcgtagcactttgggaggccaaggcaggaggaccacttgagacgaggagtttgagaagcctgagctatgtagcaagacccagtctctactaaataatttaaaaattagcctggtgtagtggcacatgcctgcagtcctggatactcagcagcctacagtggagaagatgactttagctcaggagtttgaagttaaagtgaactatgattgcaccactgcactctaacctggggaacagagtgagatcctgtctcttaaaacaaaaattgctttgtccatatattagagtcaaggaatttaaagaaaaccgcctttttaaaacagtgtctcagagcatcaaaccttggtttagaaaccttggaggaagtttctttaatgagtatggtgtcagttttcttaagggcagaatgagtttaaaatctgacctcatatcattgtctagagtggtgtctacattacctccacactgaaaaatataaatacgttattgctctttgattcacagcaaaccgtgatataaactggttatctttatatatcagtacatttttttttcctgtgagtattattacccagagtttccaagtaaagattttcaagggaaacagctgtggtttgaaaaggtttgtgataatccagatggtttctttgaggataaatctacttgatcatttaaaattaaagtctttcagtacagttgagtgtttctttatgattttaaacacactactgtgtgtgagtgagtgagagtgtgtgtgtatgtgtgtgagagagagagagagagagtgtgtgtgtgtgtgtgtgtgtgtgtgtgtgtgtgtaactaccattggcctttggggctttatctttggaaacagcaaaaatctcataccagtgtctcaaattatctaacagttaagcaggcaaaatacctgagggaactcttcatgacagcagaaactattagtgaaaaaatatagcgagacaccagctaccctgtgtggagtatgtcacactcagcctctctgggaattgccactctccacttctgatccatgatggcataatcatagctcacaattataatactgattacagattgctttccaagctgaacatatgcaactgtattgctaaacttaccaatttcagggaatctgggcgtcaaaagcatccacatccctgcagcaggcccctggggaggtaggcagggtgacagctgggaaatggggaaccagggctttccatacctgtctccttctctcagtgtccaggatcttcttgctgcttcatggctgccccgagatgctccctgtgaggcccccccgggcctgccttcacagacaatgctctgtgcccctggacctttcttctgtgctttttctgtcttgtgttcctttcctaagggccctgctagatgttgacagtgaacagcagaatcacagtgatgtgttagtggccagtaagatctggtgtatttcccctctaagttacagagaatcagcacagtctttttgtagtcaacagaagaagtcatcactagtgggactgctaggctctgtatggacctaagactgtgatatttggttctgggctcacctctcccgagttttccactggacctgatggacctatgaattttaaaagtcctggtgaggagtcgtgggaggtgcttgttaaactggcacatgaagaaggatggtgtttttttgtgttttgggttttttttttttttttttttgcttcaaggaccaaagcttttattattacaatgaattgttgaggtcgctgaaacaagggatatcctgaagtcacccgggcatggaacaccatgtttgtcttttctaactaggccactgccactggcagaagctcctgaatgagtagataagcagtggcatgaatcgtcccatgcaggtgcttattagatagtgtcaaatgagcaaagtggaaataggtgaagcagcagaaattaccagcattaagcagcaatgggagggttgagacctgcagaagcacctggttcatcagactgcatcagcctgtgctgatccccagagccccctggccggtcacctctaacatggagcgaggcctctcactccactccatggacagtagggaaggtgggtttcccagaatgaattctgaagcccaagggactgtcccctctgatgcatggtgcgaccactgaccatcaaagagccagcccctgggtgttgtagatgtgtgactaccccttacaccgatgttggaaacagagcctgcaggggaggaggcttgcccctgaatcagactgctgagccatctggtgctgcagctgacctggagaggaatccagtacatttcagacctgagttacagctggcgtggggaaatctaggagacaggtggttcccttaacagctgtatatttggttagggctgacaagaaagaaaatttcatccttgttgagccttcgtggtttttcagggatctgtagtagctccttgaccttttgccataataattgtcatttcagggaaaataatgatatttctctctttgttgaaatattgtctgcaggtgggtaatctaatattttacaggagcatattaagtgataggtggataaaaagactatggttgttaactaggagaaactcatagaaagtctttcaaacacattccagtatctggaaaggtacacactacagtcctgctggggaaaaacactaattgctgtatctaagctgactgtttcaatttggaggtctgtattcatcctgcaaattttaataaaacttaaccaatcactgtacttgttaagtgaaccattatgaatgctgaacaaagcataagacttcctttagtctaatagaagtaaagaatgcttttgaccctttttcttttttggtcctgaatgaaacactttggctgcatatccacctagtttcgtggggggatattaagcagacctgctttttacttactgatgagactaggccgggcacagtagctcatgcctatagtctaagggctttgggaggccgaggtgggaggaccacttgaggccaggagtccaagaccagcctgggcaacatagtgggacccctatctctacaaaaatgtaaaaagtagtcaggcatggtagcacacacctgtactcccaggtactcagggaaggggcaggagaaccacttgagccaaggagttcaaggctgcagtgagctgtgatcacaccactgcattccagccaggacaacagagtgacatcctgtctcaaaaataaataaattttttaatgatgaaactaactaaggtactgaggaggtaagatatttccccacggtaagtcattcagaaactaaatgtgaaaaaccaaaagaagcctctggggttagtattcccagtctccttgtctgcccaggaccccacatttgtgtaagttgctaattgcacaagggtatcctactgaggccgtgaatagagtagaaatccaggctgggatgggcttatcaagccatggactgtggcaaggagctacgcccacctggagatgggatcccctcttggaatcggcacaaaggctccaggcttccctgccaaacgcggcgcctgtggagctgtgctggggctcagctcttgggtcggacagatgaacggtaaggcacattagcagtgttacctacggtatcctcctgcgtgtcacactggaactagagcttctcttggcatgatgttaaagaatacctgtttagatgagtgtacacttttaactgaaacacttaagaactatgcatagttggaagaggatctgtagtgataagtgactgacttcaccgtactagttgtaaaggcagagtggaccttggatgaaactagaaagtatttgagatcttggggatcttcccatctccccttctgtatgtttgagtcctttcttccttcctttctcctattcacctgccatcccaccctgcttagataccagcttcaatctgtccgtttctgaaaaacaaaaaccacccaccttcttttcactaagaactttgttcaagaggaagaccctttaaagtagctaaaatcacactaagctgtaataactagcaacaattaaatgtctccttcctcaagggtcatgttttagtatgtaaatagcagaaggactacaccttcctagtggactctcaggcagcgagccatggcagggattttgcttgggtgtctgaggcaggagtgctccctttatccctgagaccactgtatgttggtcaaagctctccacagctggctcacacagaagtgcacacaattcactccatttacgtcatcattgttccttgtcgcttttatcttagcgttgtttaattctctattttcattttccctgtcataccattggtcttccagaccaacctcaactcttcgttcttggctgtggcgtggccaaactggcatcggtttttcatctcctgaacttactctttcgtaatttcctttatttcagccagtaaatggctgcatccctaagtcttcttttttaaaacatctcattcccaaaagttacctgcctgaaagtatcagattctgctttttttttttttaactgtggttattaaatgaggcggtaattcagaacttccccactgcttccttatccagaagctaacgccataagcccaggacagggaaaggagaagtcactgagactgtgtttgctagaagcgtttagtaaggcttgtcctgtttttctttgtataccaagcctgatgaggcatggttggtgtttttcttctaaaaatggttactggaaactgggatgttagtttccttttggaaattattccttggcatgaagcaattcctatggcttttctggggcttacatcacgccactgaagctgaactcaccagtgaagttgatcggttcagtaaaaaatctaccatcaagaagcagagccaagtggattctggtcaaagaactcaaaatagctgaaataagatgctcgtgaaaatggtcagtctcttcaggttgattctttaaagaaatgttataatgttcagttcccttcattcaagtgatacatttgaagggttcctgatctttggatgcgtggagtttttcaaatgccaagatgctatggtcatagtctaccttgtccaaaaggcaaaggttttgtatatattgactgtcagtagactctaactaaatcaagtgtaaaatgacaaggtttcaaatttctcttccaaacgaggaagaatcttggatgtctttagaaatcttgtatgaatgagattatactttattttccccctgaaatggcagcacctctcaaagctcttctggcccctgtctggctccgtgcgttatgttcctttaataaagccaaaataaaatacatacagtcttggtgagtgcatcactttactttttttcctcaaccacttaccaaagacagcccagatcaaaggttagcatctttgtttcttaaatttcaagtttttgtcctaccctcttttcccaaactgattgtgctgagaaactatattgctgaacaaatagccaatatctttatctacaagttgaagaaggtgcaagccctcctccaggatgcagaaggaatagtctaggatttccataccgttttctttggtggaggaggttggctggaaaaaggatatatgctggcctgcgcggaagggccggggactcccacaggctctttggaaaggaggaatcaaaatgttgccagtttgtatgccacagccatatatgtaatgcatgggccagagtccactaacatctgtttgggcatgtacccatctgtattgtagcttaatttctaagccagttaaaatacagtcttccatattggcaaatgagtattgagggtcatatgtacagaactttacatcatgtaatgtggtggagataaagaagaatgcactatcccagcttttaagaagcttataatccagttgtctgaagctttgagtttagaaagtctttcaaaaacctgacgttctggagatacactttaagaaaattataattaatgtaagcttgtgctgttgttattgtgattaaatgcttctcttcacgtaggtgctataacacaggtcccattcacatctcacccattcctccaccacctcccaccctcattcttgaatagctgtattccagagaggtgaggcacagagtcaggaattgatctccaacgtgggtaaagctaataaatatgatttaggatgaaaaggtactgtgtaaatgcttgagatgttgttattgctgttctcatatgctttattatttttaaattgtgcgtccttttaagtagattgtttgttcgccacagtctccattatatctaagcaaagcattcacagaaatttctaaaaccttttcatttctctctgtaggttgttgtttcgtaacattttatacaagaaaagctgcacttgaggcccagaatgcactgcacaatattaaaactttacctggggtgagtcggtttacttttgtaccagaatcactttattgcttgaaaatggtcctttcaactgaaggttctagttatgggctcttagtgccaaaaatgactttggtcttttgaggagtgtgtgctgaccccccagttccctgcagcagccacaccagctggccagcccataaaggagcgctggcattaacactgacgggaagcattctcaaatagtgcatcccctggttagaaaatcagagtgaccccactgggcagccacggctgccaaagagtattgggtgggctaagattttaaaaggaaaaaaaaacccaacacacacaagagaagcaaatggaaaagaaaaagcttttattcaccaggagctccttttcaaattttgtctttagattttcttttgaaaggacaaaatgtaccctttacagccataatattaagcctcctaatggtttctaaacagtcaatggtggttaacaaagtcagtgttttaatacccaatttgtggcttcatgttgatataggacagaaaatacaaagcttacaatttttttctccgtttccttcccagtaatatttgatagttggcacaattcaccagaaatgaactgatgttgcatgtaggaacaccagaatacagtttttctaaaggattttgtggcacttttatgtatttcatgctattaatttcctgatgctgtttgaatgttttccccattgacccaaatatcagtgatgagttcataatgacatgcatttgttataatgaagcacctgtggtaaccagtgcaaggataatgattttattgaaacctagtttgataagaataaaagaaagataagataatgtccctaatgttttcagggtataattctacctttgtgtcttttatttgtctctgaacgcatacacaaacacctctgtgtatatacacattcacacatgcacacataaccattgaaccaccacaggcccccagaaaagatagcatttgtatgattcatcctagactcgttcacaatacaagatcgtagtggcaaaaagctcagcaaaagattttcacaacatgaggttcttcatcacccaaaagtcataaattaagaaccttgattttgaatcatactactttggtattcccctttgtatgcgaggaaatcaaagaatagaaggttcgaagaagcaagtgtgtggtcccacaatggtcctgcccagtttcactgcttctctctgaaactgctaaggtggttcttagtaaagctgtttttattgagtctaagtgcttcactcagtgactttaaaaaaattgtattattttatctgcattcttcatgtaaatggacttttttttaacacagattctaggagattgcagtgttgggtcacattgtggaatgaacaagccaaggcaaatatttactgactcagccaataatagatgaaaatcatttttatttcccaggctcctaatcaaacccaaagaccactttgtatttcttcttttaaaaacaaatgctttctagtaatgagcatgccgaatcccttctaggtgtgttttttaaaattacttgagacagtgaactgttgttaatttagcatttaaggtatagtgtagtttgatgccaagtcacatcatattttaagtgaatgcagagcttggtgaatatgtatttatccctctactagaaacacagctcccagcatgcgatcttcatagtcgagggtgcgctcaagaaacccagagtgaatatgatgaatggggcatgttgaaatgcatgaaagcgacttatgagtatgcttctgtttgggattcttacactgactcttagaaaacaacatgttttatattttttaaatattgtacgtgtgttacttcttttcttcctaaaaatcctgcatgtagaattcaggggaggtgatgttacagacccactgtcaaggacaataatttgggagctggaaaagttggtcggtggattatttttggttttctccttatctagtttcatatgcccaattacttgaggcaggttgaaggaatttgaaaagtcagatctgatttgtaaggctgatagcctttccagtgcacacacttgctacatttgctattccaaatatggtaaatgaggagagagtttcacatcttgcatttatgtacagcttcgtccagtacacattacccttaacagctataggaaaaacatgaaagtgttttccttttagctgtgtgagtctttggtggacagaaagaaatgggaccagacataaaagattaatgcatattcttggaagaaaaaatattacagggtgccttgcggtttgattacaagccttgaaattagtcaacatttccataattctaaaccaatatacacctgttttcccactgtgatgtgaaggcacaacttaatttaacagagaccctgctgtgctaaatctctcattaaataccaagtgagttcggtaatttaaagttgtacactactattttaactggttgccttcatattatgaaattaataagaaattaatgatgcactttgccatatgccttcaatttctttctgaataaaactaaaagtgataaagaaaaaatacatcaccagctgacactttaaagcttttctggttgtaatcattttcctgtggataaaatccattaaaaagtcacttgctgccttttttctaaagtgtccaaaactttcgatttaaaacaagatcaaataatgctagggttttttccgatgtaattttcttttgcagttgatgttttgtttcataaggaacttttattatgcggccaagcttgattgatgtttggagtttgctttcctctgtatgcgccatctttctttcttgagggacacaaagaacttggttagttaggaagcagaaacaagttgataggatggtctgttgtgcaatcaaatgtgtctgccataagattttgatttaaaggcaccctcctttacatgtcaggaatgaattttagaaaccctttacatggggctggagaaacgactcccagattgaggtgacagatcagggctcttacggagcagtgcaaaatcattgaagacacgtttctcaaacttgcctcttactgggtaaccaaagaagacgctctgttttacatcccctgaaattctcaacataaaccctagaaatacaatggcagtcataaaggaagcaaattcaacagctcaacacagagcaagggatgagagtctgggagtccttcccttggtttgatcacacatctcctctagaagtggttgctggatgctccagcaacagaagaaattttaggtacagtgcctcattagttactgacatttcatgagattaatcccaaatgatcatggagtgcctacagtgtgcctagctctaagctaggtattggcaggaagtagcagggatcgagcccaagggggcctctagctaatctagctggaagggtggacagtagacaggtagttaatacttacatggttcgtgctttcacgcttttctgctgcagaatacccattccaccacacacacacatccttgagatgcctagtaagtagagcctttgtagcctgaagataacactgtgagtgtatctgcacaggctgggctacctgagaagctgttggatttggtgccttgttaggctgacttttcctactgctgggccatttatggttttggactaattttggttgcacctgctttgatgatatgtcaatttggggttacagatagcatcccttcttgagggttttatctaggcacaacctaactggtagtttgttcagtagaaatgtcattatctaccattgtgtttcccagagggacatctttgtcaaggcaacttgcaagattttcattttgttttttattgagctaatttagctcaattaaaaaataaagtaaaatagagacttacctgaggcccagaaaaactaccaagatcttttcaataatcagatgtcagggccaaatatccttgtgccggtgtcagcaccgtgctgggtgtcattctctttccaaggtcttaacacatactgtctctggtaataaggcttttggattgaaatccacagcagtatcattagagcattcactgtataaattaatttaattaaggatgtaataacagagaggaatacagttttgagaaacctcttaaattttaacagcaaggaggaagctgcggaatctaaatgtcttgtaaaatattaattgcaaatttcttccagacatcttctctgaatatgccttacccatttctttttagaatcaccaccagttttattaaatgcagtttatattaaggagttattgccctaagagaacatttgtttagagtgctccattttagcagcagcatgccaaaagatgttttacaataacccatgcaaggtgagcgaggactgccagagatctggggtagaaaaacaaatgagcctgatccaatcggaggaggcaggaagggaaatggcctcctgggacaagtgtgttcacccaggtggagtgaatgggccccttcctggcctgccctggaagagataatggaccagtgtgggtaggcaccttcctcccaagcaggcttcactctgctcgccatggagttggcctctgtgttctttcctagtggagtgctgcagtttctctcttcagcaaaaaagcttgactctcactggggccaaatttcatttgcccattttaatgcatttggaggtgttcattttctttgaaccacctctcctacttagtgataggtattaatgcctttgttctcagagccacgattatcatcattttatcattgtcatcatcattattatttttgccataaaatctctcaaacctcatctcactgtgtcagagaaatttctcctgaaaccatcccattggaatcaaagcctaactgggccaagttagagtatttttttctcacatgcctttggtttaaaattatcatggaaaacaaccgaaacatctgtatgaacaggtttgagtcctcgaagtcttgtgccatgcggggcacacaaagcgctgatgcatttctttattcggcaaccatgtattgaacgtttattgtttgccaggcactgttctagataccagggaatactgtagtagcagccatgccctttataaccaaatcaccaaaccacaaagcctgccaccatgcttacacgtggtatgtgtttagtaagtagctcttacatagtgaatgcccgaataagttagtttttataatgaaatatttccaaaggcctacagttttattttctaaaaaaagataattatgcctaaaaatatttcaaatgttccaaaatataaaatgaatgtagatacgttatcacatgtatgtgtgtttagtgatacaaattgtttcatagacacagatctatatatgtgtatgtctatatgcccataaacataccttccacacgtacacctgtggatgtcagtccaaataaatggaggaagatgaaagttaaagtcctccccgttctctgtgcagcctgctggcttagtctcaattactttgtagcgaactttcttatttgaggcttcaccaacgatctcagttccttggtgtaattataattctttgtttatgggtgctttgagtccggatcatggcagattcatggtgcgtgttagagagggtgcttgagaaatggccgtgcgatgatggtgagctctgcttcccagcatcctcacagtcaggcctgagcggggcactgcctgaggagcttcctgagccatgaggaaacatgcctcaaaaggcactgtgtctgcctcctcatttgtgtaggtgtgaactctccttgtggagcaccccagcatacaaacgtgtggaacatacacgtattccacacatgtattctgctgcggaatgtgtcagtcaggacatccatttggtgcagatgcttcagatgtacatttgcagaatttggcctgggctgagaaattcgccctcatgggactgcctaggaggagccatttccctgccatctgtgttttcagataatactcaaatctcatacaaataaaagccaaacaaacaaaataaggactttgtttctcttggagatgactttttaaggactgtgacagagagtagcagggggagctccggaggagtccttgagggtgcagaagctcccttccccctgcaggagtcacagcagtatgaaaggggtaggggcagagtgtagacccagccccaagtcgggctcagccaggtgcaacaggatggctcccagctgagcggtatagatccaggagaggatatcggaggatggaaggaaatcctgggcccagtgagttccattctgcaggcccaggccccagggcaatgggaaagtatattttaatgcttaataaaaggccattacaaattgtctatttcacccgccataaagttttacacactacctgaatagcaggttgttttggttttggctggcagtctgttgattcagtaatgttgatgggcagttatttacgtacggctttgattaaaataaaaaactagttatttttaaagcatggcctactcggtataaggaattgtacgagagaaaatgtatgaggattcttcagtggtgcaaagttgaaaatgccagcacaggattacagtagggaatagccacaccacttttggcctcagaacccagtggaaggcaatgtttagttttgcaaacaacgtagtctcagctatatccctaattaataggactgttgccagggcttgtgtgagaaagtatgttaacgcgctggtactggtgcctgatcagatttgcaaaagtgccttgtgtcattgcttgagggatactggtatctcattagtatcttgtgaggggatggtaggatggtacaatggcaaaatgaagccatagttagatttcagagataatcatttctctacgacagcccaagattaaactgggaatatgcagttcacttacgtcgaccttagttcccaaaaggttgataggatttcaaaagaagattgtgggggaggcgggggatccatgaatttgattaaaggtctgcatggaattacagaggaaggaggtgagctatgataatcaaatgatgaaaggagaagtttgatatacacctagaaaattgtccaaattctgtcattagcgtatagggtttccatgagaactcatctctgagaatatcatatctggctggacagatctttaatctttgacatcagctgagcgtaactcaggagatgatgtccaggtgaagtgcgctcgtgagttcggagcctggagctttaggccacacaaaaagcatacagcatgggtagatgtggagagagttctcccaggaacaccaaggttcttcccccacacactaggaaatagggaatggctgagctggggagagccaaggccaggatcagagggagtcagggctctgccggatatggtctggtttgtgcagggaagcgcgctggacacttacaggagggcggtgtggggagggaaagaagtttcgtctgtccctctgctcgtttcaaccataaatggtcatagcatacaggtgcctgggaagtctcattagtagtatgacataagctgttgaagttggtttgataatgaaggaatatttcaggcccgtaccctcaccactctcactgcccaccagccgcagagatgaaagaataaacagtaaacagtgcgtgtggagatcgcagaaagggacactgtgacaaaggctctctttcatggtcctcattgtccctgcctgtcattacttcccattaacactcaaaacacacatttgtgctgccatcccctcctcctccagccttaaaaacgcttgcaatgccctctgtacttgatctgcaaaacaaaaatggttggactgagtggctctttccaatcttgcaaaactcttctttgctgtccatgcattgtctgtggtcatgtcctatttaacgaaaatctctacactgtgacttaacttggttctgtgatgggttagtcattttagagtacttcacgtagacaaacgtggattattcaagctttgactataccctttgagattgtctgggcatctgctttcctctctggttgagaaccaacagggagcttagtactcataatttttccaccgggaaatggagaaaagaaagggcaaggggatggactcgaacgagtcagtttatttccttgtgtacagccctggtttgacaagaaagggtatttaacctaatgaggtttcaggatttttggtggatttttttatctatttgattcctgtcctcagctaacatgggtaagtgactcctctgtgtttgtaaatggctttatagagttgtttatttgttatcccttctaaaaatatttcaggtgatgtatcgatagcattcaccttgttacactgaggacatctctgaagtgccagagattaaattaacttctctgacctccctaagcaaagcagtgatggaactggaattagaagtcgtcatttctaggactccccagttgggttggcctcgtggtggtggatttaggtgtcatgctcactgcattgtagggtggaatgggcgtggcttaagaggccagcacagcacaacgggaacagtcaccgtgaaggaagtagctcctctttatgggttgccatggggaggctccatggctgtggtttaattttcacaactccacaggacatctgttgtataccctgttttactgacaaggaagctgaaactcaaagaagatgagtaacttgtttggggttaaacagctggcacctgactttacaggcagttgggtagaaccagtatgtctggactctaagccaaggaactttccattctgctgtgtgttggtgcaggcttgccggtcccggcaagtggtcctggcaggtggagggcctcagaaggaccacatttgcccctttggcactgtcacaaggtaaatctaaatcctcagtcctgccccactcctgcagctcgtcatagatgtggaacagcaggaccatgacagttctggctgtgtcagatggcatggacctgctgacagggtgcagcagcatgaacctagaagtcagctgggcaggcagtggccacacaaacacacacacacacacacacacacacacacacgagctggccctgccacagcaggggcatcggggcacctggcagcggctgtgcccaaggtgggaagccatgttcccttgcacaggtcctgaaaaacattcagcgagcgaggcaaggtatttgctagagacttttgggtgtgaagttactaacacggagctttctaagaggaagtgatagatcaaagacagtcatcactgtaagaggtactgctttgcgaaagtgattataaatgcaccatctttcttcagcagcatcatcgcattgacattcatgttattagggtgcatttctttatctgcatccacaggctttcagtcccaatccacaatctgcattttaatgcccagctccgtccaactgtcctcgccattgctctgcttccgtgttccacagacaggggaagggcaagtatggaggctcaccctggaagagtgagcaggactctgttacctgcaaccccaagctttaggcagcaggacaagaggccgaggttgtgaaacaaacggaaacctcaacctgcctgccatcatcacaccctcctgccctgaaaactcctggaggcctttagaaaggaactgttctaccctgttgttttactaatgaggaagtgatggtccaagcagtcaagtctgcataaccatctaagcttctgaatctgctgctgccgacaagggaccagactcaccaccacaaaccagggcactgagaggtagaaccaggcagcccacgccacagatggcacagcaggatgaacacggccccatgagacagcgctgctgctctccgcatcacagcaaagtcaaggcaaaggaggatgggtgccaggggtgcctctgcatgaagtgctggaagcttggacattcctaggccagttaggatcaaaggctgagcactggctgcgatattagggccagttctgggttggctctgtctagccatcacattgtggtttttgctgttatctgctgttagattcggccggaatctaagggatagagatgtatcatgaggtggaagctcaggctacctctatcttagttacaacagtcagagctcatgatgtcatggtggcctctggcagcttgggttagaccaggtggttatttgccacctgtaggctggcactttctacaacactgtcacgcatcagggacgagggtaccgagtgagagcaaaggataggctcctgcaaactcatctcctctcctggaggcttaactgagtgactgtgggtcgctgggtgtattttaatctgtgacattccacactttgtgtactcaccagcacatacacggtattattgtttcctcagaagagtgtgtatttaaatacctgccaggaaactgtgcaggtatttcacattaagtagcatatggggctcagtgtagtcaagaagtcacagggattaggaaagagaaaatgaattgctgtcattctatatatgttatatgcttagtaaatgtcagaacagtagtcacagaacctcaggatgtttctagcatattttggcttataaatgttttgtctacataatggatatctatcagtagctttcagaattcaagtaattttaatgaaataacactaaatgttcaagtattaaaagtagtggtaacagttaacagctattgagtgtttactatgtcctcagaactatgccaagaactttatatatacttgatctcacataaaaaacaaataaggtagtaatttgtcttccttacctgtttgccttttcaactagaagcctattgttctacattcaagaaagtgaaagtggctacacctcttagagaacatttctttaatgatacatcagtgagtatcttttatgggtaataatctacctattttaactagatacaagtatgataagaaagagacctttcagttaactgaagctaagctcatcctgtcttccttacattgctaatatctgacttacaatttactaatatttgtaaggtgtcatttaagtaggtgtggaagcattagcctagattttgactagttctttggtgtcttctgcagctcatagaggcactataatcacaacccccacccgcgcccctcgcaaaaaaaaaaaaaaacttggaaccaccattttatcatttgagaatctcagtcactgagttaacctgaatcactcctaaggcagagttaccaagattttaaaaactctgcaggtcactgacaaaaactaagtatcatcagtaaggaaaatacttaagagagaatcaaaagcccaggaaatcctgtagctgatttcagtcggttctcgtttctttgaatgttatgtgggtcaacagaggaagaaaggacctgtgcaggaaagtaggccggatggaattatagatcacagaccctagaagcacgtcctgtccaagctcctcacttgatagatgaggaagctggagcccaggaaggtgggaggacaggtgagatgctgaaggtcacaccagtcagtgctggggtgagtacagatcacatctcctaactccgagcctgttgctcttttcagcaaaccatgcccccgtgatttctctgcaaggttatgccaagcatgtcaccttaaagaatcagaaatccagaatccaaatttccagtctgtgtgtagcatttcattccatgacttgaggctgttgaacttggtgttttctttttctcatttccattctctgggaaagacccagaaacctaataagattcttcctggccatctacccaaaatgatatgtgcagtagatgaacttataaagaaccgatgaagacaaaggaaagcggtcctttgtacttcagtccatttgcatataaaaccggggcagtgattctcagcctcagctgcacaggaatagaatccctcgggagcttttaaaactgtgtatgcccaggccacaccacagccaaataagactcacttgggatgagagtctggcatcagtattttttttttttttttgagacagtctcgctctgttggctggagtgcagtggcgcaatcttggctcactgcaacctccacctcccaggttcacatgattctcctgcctcagcctcccaagtagctgggattataggcatgtgccaccacatccagctaagttttatatttttagcagagacagggttttgccatgttagccaggctagtcttgaactcctaacctcaagtgatccacccacctcagcctctcaaagagctgggattgcaggcctgagccaccatgcccagcctagtatttttacagcttcccaaatgattccagtgtgcaggcaagttttagaacttctgttaagagaatgaaccatcgttgaccccaagggctaggtggtggtgacataacttgttttcatcttccgctttcatctggatgtacaggcactgactctgacctgctcatcatcttcccacaggtacactggagtcttggtactcaagcagcagtcacgtcatctgagaaagtgttagaagtgcagccttgcaggccctcccccaggacctgcatttgaactagatccctgggtcttacacgttcacacagaaataatcatgtgaggtgacagatacgttaactagcttgattgtgatcatcatttcacagtgcgtctgtgtgtcagaacatcactctgaaaaaattaattttttttttaattgaaaatactgaatcctgggtgacatggatacatagcaaagtttgagaagtgctgttctgtagaaccggtcctctccgatgctctttccctgggagtccctcacagggtgcactgtagggcaaccccgtttgtgtgtgcacacacacttctcgcaagtgctgggttgctgtgttccctcatctgagtaccaaagtcaagagagatcctctggagaggctgccaccctccctgtttccttccagacattctgaaggtggggtggagtagggcagcctgactatggaggacaggaggtgagaaagtaaatggagatgtgaggacatgctggtttttccagcatccttgaatgagcaactgggtttttccctcccaaccatcctctaaattgtgggaaatctctgagtgggacttacatagaattaatgtgtgtcagactgtaaggggatgaatggaaatgctgctattttaagcacagtttttctggccagaacaagctaattctaaagcatgaggaacaattttctgccacaaagagttaatctgtaatactcagcagctcatttccaccttgcagaaagcatcggagtgtagagtcctgctgtttcatcattcacggactcgaaattcgttaccaggaaagcaaagcatttattaccctgtgtctcttgctatccgcagcttgagagacttttgctgacaaagaaaatgtaactaccacatgaatgctagagtggaatatactattgcctgatgagggatgctgggtctatgtatgtttttgcaatttgggaggcttaaaaagaatgtcatctgccctgaacagtgtaagatttccccttgagtgagttctgagttcttgtttttcattcttccttcttgtgaatctggagaagtttttcacattgtgggttattcctaattattgtagctacaacaaacatcctggattgtagtctgtaaggacaaaatcatttgttgctgcataaaacctgaacttaaccatggtcagcgtttgcctaaatcagcagctgctgcttattagaccagcatcaaagagtgagctgcagttgggcgaccaaataagaaacaaagtgattagaagatccttgtggaacaggaaacagagtggggcaagacaagagagagcatatacccaggggaggagacaagctagggtatcatatctgcttgatggggtgtcagccctgagcagagaaggggatccggaaggagtatgtgggctggaagataaaaaggaccagggttcctgcagaacttacagaagcacacacattgtgtccattttgctcattgcaaccaaatgattaactcttcagaaaaaaaaaaaatcctgtttacttagtttgtatatggttgctttcttttttttttttttttcccaaaaaggcaagaaacgtttagtctttgatagaggagacagctttccaaacaacgggactcaataaagacagcatgaggttaactgaacctgatcctgtctcttctctttcccctctcttctctccattttacctgcagtgcactcaaaggcaaaaaaataaaaaataaaaaaataaattaaaatctttcatcatctcaatattacataaaaattgtgttcaaaagagaaaaccaaattttacctttgcattcatgtattattagtgttaagtaccaccgccccatctttttttttattatactttaagttttagggtacatgtgcacaacgtgcaggtttgttacttatgtatacatgtgccatgttggtgtgctgcacccattaactcgtcagttaacattaggtatatctcctaatgctatccctcccctctccccccaccccacaacaggccccggtgtgtgatgttccccttcctgtgtccatgtgttctcattgttcagttcccacctatgagtgctgtctttcattctcacattcctgtactcatttctgttgtttcagtatctgattagagctgaattaatgtagtcggggctaaaaaatagcttctatctctcagtgacacatttttggagactcataagcctcattgttttctcatcagtgacaactttgtctctgagtcagatgactcgagtctccttcacccgtgatcttggggggaaaaaatagaagtgagtaactcacacagccacaggaccaagtgatcacaatcacagcatccactcattagtggaaatgagctctggactcagtccagttgacgaatggtaaaatctatggctcggaaagaagggaaagagcagtgctgaagatgtttgagttcttggggtgacctttgtagctcctcctgagatgtgccttgatgatgttgccttgatgatgttgcatggtactgatttcaaggacacaccacgctatatttttacataatctgcttcagaggagttagcccacattcatggataggagatggcccacattcatggataggagatagcccacattcatggatgggagaagaaaaatggcagagcatgctgcatatgtggcgggactgtcatgaggctgtcagagtcaattgtgccaggttcccaattcccagagcagcatcccggagtcttgtttagtcatgatcttcagcctcttgacagcatttggttagcagacactatagcttggactccttggatgtgttcataggcattttatcttgactctgttctctaaacatggcacactctgtaagtttcattgtaatgtggctattaaacatgtccactgtacattaagatttactgggaaagaaaacctacctagaattcagtaaaattctaactaatgaaagagtaaatacaccagctgttcaggcccaacactgatttttaaaagggcagattgggcctgggctacagctcagaatgttgaagaggctggattggagcagagctgagggaaaaagagaaaaagacaccttacgccatgggctttcacacacgcaggagaaacaaacgctgtctcctaagttacaggaacttgggtgtactttttcagagactgcaagtaaagggtgtgatcaaatgctgccctttaaacactgacatgccccgagttctgttttcactgctttcttctcacgccgcgtgatttctttaggtcccagtgatcccaggcttccgctacctctacaggctgctgccagccaaatgtttatctgaaaatcgggcttctctgctaaaccccagacttagatacccagtatctgctattgaacagatccattcaaatggtctacaggaaattccagtactaaaattactattaaccaggtcttcctcctgtattgcccatcttaagtgaattggtgggtcagccaaagccaaacgcaagaaatggtcttcctcatctcctcttcctacatacacttcacctttctaacccccaacctccaacagtgaagataccgggatgctaccttaatggcacctctagaattgctccgtctttatcaagttgggactcaccagttgtcattaggggtaataaaggcacagcaagggtgaggggatttgggaggttatccctgtaatccccatgcttcctagtattctagatgctctctagaatgggagaggtgggtgtgccagagttgtacatcaccccctacacccacaggcatatgtgaacattgctgcatcttgtatcagaaaaatcagatgtgactgctgagtttgaagggtgagatccacgctctatactgtgcccctacctttttcttcagcttctgggacatttttgctcatgtgctgtgtcccagctgtatgatacgagacacacatttggtgtcttatcctgggaaggtagaggtgaacattgcttcattgtaatttactgtgtcacatggttcaatttatcctgtcacctgctgttcttcattcccctccatggctgaggtctcagctgctcctgttctgagctccaaactccttgagagggaacattgtcagagcccggcttaacacctcacaccatagatagtgctcaacaaatgtttgttgaatagatgaactctgaagaacagcttttattcatagacactctttcaacataaaaaaaattcaagttctggctgggcgcggtggctcacgcctataatcccaggactttgggaggccgaggcgggtggatcacgaggtcaggagacggagaccatcctagctaacacggtgaaaccccatctctactaaaaatacaaaaaattagccagatgaggtggcgggcacctgtagtcccagctaatcgggaggttgaggcaggagaatggcgtgaaccccggggggcggagcctgcagtgagccgagatcgcgccactgcactccagcctgggtgacagtgagactccatctcaaaaaaaaaaaaaaaaaaaaaaaattcaagttctttacaaactggtgggtgggggtgagaggaggcagggagatcttgatcccctcatccccatcgcaatcctttccatcaggtagatccgccctccacagacaacaaacgcagtagagacaggaagccctgcagagttaaaaaggcactttttactctaattataatccttaactgaatgaagaagagggttgacaatccctacgtcactttacattttactgtgtactttcatatatattttcttattcagtcctcacaatgatgcagtgagttttctggtacaatccctgcttcaaacatgagtttaccaagttttaacgaggtcaagcaacttgactcacatacttggaattggcagagtcagcattcaaactcagaccttacgcttctgtgatgttctttccactaacaaaaaacaaacataaagacaaaaacaaaacagacataaagacaaaaaaaacaaagcaaacataaagaggcaagcttcgcaagtccccattaaatgctacatttccacagttgttagaaattatgaaagtagaagctatgtcaccacaggtcaagtgctgtcaataaagagttcttgctttactccttaacataaaatctctcccacatgcttgtctcacatattcctcatctgtgtttacctttgccatttcaatttcagttacgtgcggtatatctgaaggcctaatccttgaattttctctttaaaagattgaacttgaagataagcatatttatagaacaattgaaccttagtcataatttctctaagctctaccaaccagtattttccaaagttggtgaacaatctcacacattagaatagaaggtagaaatcaaaatgagtgaaattaaactcaaactcatgaagactgagcaacgctggaggagagctctttgtttagcaaaataccaagcaaagtcagtgcaactatggaagacgagatgaataaatgtagctgctgaaaacaatatctgatgtcttgctcagatgtttaatggatttgcattttaaacatgggtaataagaaatagcccttaaggcactttgtaaaacttgccatttatttttaggagagaagttttttttggggggtggggggacagccttgtttgtttaaaaggaaaaaaacagatatttaatcatttttgcttaaacgtgagtaagaatggggaattaccctagttatgttttcattcactcagtacaactcccaaaggccatggaggtaaatgaatggaaaaagattgctgagtgaggtgtggtatttatgtgtctgtcgtaaatgaagttgtcattcctaaaccaatgaaatcatacattttttatgagaggttgcaacttgcagagaggtggaaatgttagacactaattaataaacgtggctggcaaagcaactcagacaactcaggactcataaactaagctatgggaggatcgttagaatacgaaattcagtagtgcttttccattgatttcatgaaatgcccgtatcctgtcagaaggttcaagataaaatacaatcggcttaaattttccaagttagttttgaaccagagattttaaagatttgcttgttagaggggtattcttgtggtggctttagattgtcttaaagttcaaaggaaactagagattactggataagcatcaataacattaacagagcattgaagctgcctggagtggatggaggatgccttgcgttgtgcaggaaacactcatcaattctgtggtttgtttagagggtagtgttgttttaagtcatcaagtcactgtttaacttgaattgaaactagtaaatactgcagatgaattactggatagctttccaaaccttaaaaaagaaagtctacaaaagtggaacttcttggaccttttaatgagttatctgaaaagaagagaatgtggtttcattcgtatgcaatatataaggttgaaccatatgaaacggtcactattaacccatgtttttaaaaaactacaaaaacggcaatttcacagcaattacccaacctaacttgaagtatagctgtttctgtataataaatgtagaacagttagattggcaaaggaaatacgtgtgtacgtgcatgagaagggtcattgtgccgttgtgtggataaacacacagcagaagttcatggaatagggggttgcctgattccactagaagagagagtgatggaataatgcgaaataggcctgaaaagagagctgagggtcaaagcatggaattccctgaaatacatgccaaggagctggatattaatttggtagataagtcaaagtctttgagtgggggagaaaaatttctagactgagttttagacagattaaaaaggcaatggtgtagaagatggaaggcaatgaccagaactggtgaggaggctgtttcggggatccaggtgagcaggaatgaaaacctcactagggctgtagccgtggaaatagaaaagtctatgagaaggaaaagaaattaggagagagagagagagctaaactgaggatttcaaggggtagaaaattaagcaaatttagagccacgccagagtgttaggtgagaggtctgagaagctggaagagctgcccccatcccggggttgatgtccccataagccgtggtctctgtccagcttctcaagttctctgtggggtacccagattcaggtcatttcctatggggtgaggcaggagtgtggctggaagagtctgagtagtaggtcatcctgggaagcagtgtaagagatcagggtggacagagtcgagccctgcaaagaggctcagaagatccaggtgaggagacttgttcccaatttgaggccagcacatgtaccaggtcgtcaaggggagcccaggtgcaagggctgcttcagccccactagcatctccacactgggtgagggttacaagggaggctgggggtcagccactcactggcttttggggctttgttcatcccagttcccaagatgtcgagaactgagtcacagtgagccccacctgacaacagctggcactggggagggcaccgaaggctgagggagcactgaggccccaggcagcgtcacggccagagacaaatgtcacaaggatgatttgttgttaaaccacaactcgtttctcttaaaatatgagagaatactgtttgtcggtatatgttattgaaagtaatggtaaaaaccacaatcactttcgtacaaacctaatagaatctaggattggaaatgtaaatgagccaccaggtaattaaaccacgcctttagtcgcctttaatggccaggtcaggcattatcatttcagtgtgtattttgcattgctcagttgggcagcttgtctgatttagcgcctgggtaagatctggagaacatctggaagaatgagtattggagcgcccatcattgacttcggaagacagttccacaagtcagaaaggaatcatggctgagaggatgtcagtatacttcccacttagtgataagggaagattattacctttctcttaatttgagctcattaatcagtagtgattgtgatcttccgagtgtcgcacacaattctcgtggtcttttgttgtaattgtagctgtcatagtacagccttagcagcactataatcctataaggcttttcatacgttgaatctttccatttatctccattttcaaaattgttttataccctctagtttcttgctattaaaacatagatctaagcaaaggattccagacaaacctaggtataaacttttaaataaaaactagttttgctttgtatttatttgggagctcaactgactggattcattgcttcttatatcacaaaggtgcattgacataaagggaagaactaaagtattatcaaataaatttcctgttcacaataacattgctaaacacagtgacaataccttctactgagatgatagctagttgggtgccacatctaatgggaaggttaaaaaacggcatcagtttattcatctttatcactaatatagtaaaaatatttctaagaaaaattgaactaagaaaagattgccatttttttgagtagcagtgcttctgaaagcggcacactcacactttgatcatagctgttatttttcattcatggtccgtgcctcctattttaagcctattcatttttcttctaattttaacattaaataaagcaaaatgaaagcttgtgttattatttagtatgaaaacacagaacctaatcacagctaacgagtgtgataaatgctaggctgtaccttctcttgtttggtgtgtgttttatatacaggaggtaacataggctgaggaactaggatgccaagttacagatggggttgtggaatgctgtctgacagccgattagagtaatctgtcagaaatgatgacttaatcaccataacagactccaaattccctcatagaattccacccagagtaatctagttttcctgcaatattttattttattttattttttgccaggactaaatggctttgttgcttgttttttcccctttggtgtacgacgtgattttaatggaaatgtaaataggtggtatctttacagcacaaaggctgatttggagcctgataagccaaaatcagatatataatcctgggttctgcagtttttctccatcactagattattagcctgtggagttgagcactgctggctgtatatatcccaggtgaccgagaaaggccattctctccaatgtgttctcttagctttcagatgggaccttgtctccttcccctcagggaagctcctatactttgcaaaataataatgaagaggatgatgatgacaactgtagcgggcacttactgtgccatcagtgttttaagtgtgtcacacacatcatggctatcaggaaaaagttgtaatttatttccactgtagtttttttcccctggttgggagaaggggatatgagataaggatcacttctgtttctttgttgttaccaaactcaaatccacttttttttttaaactggcttagatcacttttataaaattatgtcagcaaatggtgattgaaagttttctgacaaggcacagtgggtcgtgcctgtaatctcagcactttgggaggcctaggcaggtggatcatcttaggagtttgagaccaacctggccaacatggtgaaaccccgtctctacaaaaatacaaaaaattagccaggcctggtgcaggcgcctgtaatcccagctattcgggaggctaaggcaggagaatcgcttgaaccgagaggcagaggttgcagtgagctaacgtcatgccattgcattacagcctgggcaacaagagcaaaactccatctcaaaaaaagttttttgtgtgcctactatgttaatcgtgatatgtaaaagaacaacttgaaatagcgctgagacttggaggttaggtaaatgccatatattctgcctccatcatggaattggcatcttcagagggtaacagttttttcccgaatttccaaagcagtgttcagataaatagaccttgcataatccaggcagttaacataaagccacatagtagggccttttgacatgaatgattgttcacccaacaatgagtggtcttcactttgattcgttttatagattccagtgtacttttttgcactatcagtttgtgaatacaccacaaaatgtaagatcaattaacgtcagtgattcacaaccattgtttcctctcacacttctcagcgtctatgtagaacatttcagacagctggccctgtgaaagaaacctcagagtctaatccactgtgtgagttttgaacctctggatccaagcatagatttagctctgtccttgttagtcgaatggcaaattagccggggctacacttccctggcctgactctaaagctatttttttttcattacatgtttttatttctttcctgcccttttcataaaacccaaacagtaatttttgttcttgggctaattgttaaaacattgtatgtgtatatgcaaatacacaggtatactgcacacacatataaagtatgagttcctcattggaaagaagcctgtaggtggaggcaatctttatgtgtagcgtggaagagggaaattatggtaatgttacagattcttagaaaccccaaacttacttacaccacaactgtgtggatgcacatgacaggcggcgtggggtagaggcctcaggcttgtgctcccaccggacagacctggattcgaatccctgctctgccacctgcttgctgtctgactcggccaagttatttagcctctctctgcctgggttcctcataggtaccgatttctggggctcttgtcaaaattcagttaatgaccatgcataaagagcctgtagagtgacggcgaaggggaggcttcctctgtgttgacagcagttgtctaaaggctccattccacttatcaggaatagttatgacctccagatatggctttgtcccagtgataaaaactgcttgttatttattttttgaaacagggtcttgctctgttacccaagctggagtgcaggggcacagtttgggcttactgcaacctcttcctcccaggttcaagcgattctcctgcctcagtctcccaagtagctgggattacaggtgtgcgccaccatgcccagctaatttttgtatttttagtagagacagagtttcaccatgttggctaggctggtctcaacctcctgacctgaagtgatccacccaccttggcctcccaaagtgctgggattacaggtgtgagtgaccgcgctgggccagctgcttgttattgatctgacagattatttttgtcatctgtattcttttagagatgtccttctattaaagatatcttagcaagtttaccgtagtgttagtgttttgtttttatttttttaatttgaaggttcttctttagtgctgattgatgttcctaagtcaccatccctaaagctatttttgattattccccatctctgctatcaggagcataatagaacagtggctggaattagagtcactcatgagggagacaggcaaacctgtgtgggttgggggtgtcttcctatgtaatagaaggtctcgtggtggggcatgctgtctttcatttgaggggatgatgggcctccagttggtggcgaatcttttgaaacttgtttttagcattcccaaatttttttagagaaaaattcagaaagtacaggtgcctttggcgtttcatagtcaatatacaagcgagacacaagtattctccatggatgatttttgtgttgtcatggaatgaaagaaaaataccagtgggtctttactggccataatattttcgttttctcagttggcacatagctctttcgtgaattcacttctttccatcccctctctctacttttaaatattttatgggcagtaagctcacaatatgtgctagcacggctgctctctccagaggtcaggatgggtttaataatgagatgcgtaacagtgactctgtaaaaacccatttcaggttaaaaatggcatgttttattgaatctcatgttaaaggtggttaactcatcaattggtgatggctggggttaaacaagttccaacatgagttctcctgtgtgtgaggagccagctgtgccccctgcccgcagctgcttccttcccccaggactctgtctccagactaggcctgtgttggctcggaaccctcccttcctacagcagagacccaccgaggcagagggcttcagagagccccacgaggttgtgtccatagtggcgactctggagagtatagctgctgggtgcagctgctccgtggccagcttcacggcggcaccaggtggtgacagctgttggcagagctgtgtgcagcgctctgtgcatgcacttacccctcagacttgagaaatggctttgctccaaagtcgtactctcattttcattttcatgagtcacagctggggccttgtgggaagaatcgaaggtcagcttactcaggagtgaggggcatcaggtccagtcacaggccagccagggtgaggaccagggtggaccactcagctctgggaccctgtgtgtgtgtagggagggagaagaggtgggaggaccatgggctgcttatccccaggaggtgggacgaagggggaggcctgatgctgggaggcttgtgtggtccgccaccaacagatggctcctaccagggcgacagggacggaggcgccggtggcaactggtgctgggtcagaaccaagccactgcgtgctgtcgtgggtgcagaagcttagctttggggtagaagggacagtgggccaggggccttccctcaagaagctccagctcactgaaagcccaagcagacccctgaaggactatatctctgtgtgccgagatgctcccctccatgagctccaccttcattgtgcataggacgctgattcttagtacacagcagcaacagagcttcagcagatgccttcttgggaccgcgcttgactctagttccttctccccgggagggagaaagggaaggagcctttgaaatttcccctttcgctatgtttcactggtttttaaacaaatagggctaaatagagaccaagaagttaaccatgtaccttaacgtgcggctttaggcaaaatgttattcaaaaaaaaaaaaaaaaagcttctaaaaattcatgtaccatcaaggaaatcttcacatgaatgggtttagaagcctttcttgatagcaatgtgaacttgaagaaatgtgtgacatcccgtttactcccatcaacaggatctatttccaaaactcatgctcctgccatttccccacaagcatgctgcggccttgcgtgagaggaccagagatctcctgtcgtcttccaggcttgctgcaagtgcagctgagatgaacataagtaatagactcattaattgtttcatcgtgactcaggaaaaccactctgtaaagtcagaggctggtgtttgtaaaattcttagactcgtcgaacagcatagacagatcatgacagcacagaccactgaagatttttttagatacagcccatactgtgtctgaaaaatactcactcctgaattaaaacttcccattctgtgtggctggagatgcagcctcagtttaattagcacacgtctcttcagagactccttgcaaaaattctggaagatcgtgtactcccttgtcatagacagaggaaggaggtggcccctgggaactagcctcagccctgaccctagccacacagtaggtagattgaattagcgaccaccacatcacctgggccctcccccgtctcctgctgtctactgggacctgcaggcatgtgcagggcacagcatgagatcctgcctccagccccatctaactctggcagcagggagggccagggtccctagtcatggggaagcagttgagaagcaacagttctgaccccactcatttcatcattagctcttgagaagggtgctcagggtgtggccactggctgccgcctgtcctggcacctagggaagatttcattcaggagtgagtagatgggcattgtttctttttacttgaaattgtccagcctatgaacatatccctcactgttagtcttgtgctttaggtgtcttgttttcggtgaatgttctttttaacaacttccattggccgggcgtggtggctcacgcctataatcccagcactttgggaggccgaggtgggtggatcccaaggtcaggagatcgagaccatcgtggctaacatggtgaaaccctgtctctgctaaaaatacaaagaaaattagttgggcgtggtggcgggcgcctgtagtcccagctactcaggaggctgaggcaggagaatggcatgaacccgggaggcagagctttcagtgagccgagatcatgccactgcactccatccagcctaggtgacagagcaagactccgtctcaaaaaaaaaaaaaacagcataaaaacaacaacaacttccgttgcttcctctgttggttaggatatcgtatcattgttcttgatcaacagtagggcctattttctcttattctgtgcctccaaataaattgttcttttccctgaaatgtcctttccacatcttccggttaacatgaggattgctttgagaatgaatgcagacatagcttcatctgagacgccttccccagcgtgtccttcctccatctgtgtctggtgtctcttctctgagttcgcaccgtacagctcttaccacgtctcttatcacgctgtgggaaatgcttgctgtatctgtctctcctaccacactgcaagctccatcacaatgagaaccccttctcatcctcctcttcccagcatctaacatatagtgtctggtaaaaacagaaacacgtgaataaacgagcagtcatactgggtcaaatcattgaaaccatttctgttacagggaaagaattctttttccatccttatactttaaaactttgaactagaatgtctactcttttataataacttctcaagaaatctcccaaagttctgggagtcggaagattttgaggaagtgaaacagtattatgacaatgactcctcccacccatttttttgtcttccttgacatttacatcttgtatgtgatcagaaatctgtaactcaaatgaactgttcatggtaatgagccattattaatacagtcctgattgaacacctttctctaagaaggtcacagtgctttgcatacattatctagcttgtcttcagaacatacctgaagtggggtgaccatctattcagaattcaccatggtctgacaatccacggctctgcgaagttgatttttcccctgctgagcccaggaaagagcaaaacaaagttcaggtgtgcagtggcagtagctgagttatcaccatcactgctgcttcgcagagccttctgaagagtcttacggcagcacaagccaattctctgagcagctgcacgaatgctaagggtgcagtcttggtgtcatatgagtcatacagctatagagatcaggtcctacaggagttggggggaagggaagattactttcccctagggatattgcaggtgcctttagacgagtgtgtgtctgccctcttcagtgagtgaagcatgccgttcttaaccgaaggctcatatggccaagtcccacattggacattttatggagaagcagtgtggtttaggggaggcatcaccagattaagagtggagatattagagttgtgtgatcccagctctgtcgttaatcacctgtgtctatgcagtcacttattcccttcatacctgtcagccgagagcactgactgcgtgatttccagggtcctttacagctttagagtataggggctctgtttttgctgctcccgaatttccacctgccatcatccacgcatttcacagatgcatctgaatgctcacagtgctctatttgtgctcttctgtttgtccctgttttttatgtggatgcgtatcgaccgccatgatagactgcacactccctgtgggcaggagccatgttcatttcatttttgtgtcccaggcataatgtaggtgcgctcacctcatctctcccatatcttgaacctgtgaatctcagtggactcttttcagcagatgaacctgtataagtctttcctgtcttgaaaggacagatgggtggcccccatcctccactgagcttcctgttgaactccctttgcaggtgacctcaaaatagaagaagccctcattcaccctatctactgttaccctcctcctttcccctctacttcccatgaccagttgttcactgcccctccacagaacctacttctgataaatcccgtgaagaattttttattgccagatccaaattctttggcctctcacagtgtttgctgtggcctgattctccctcattctggaaactcctctcctctcatggctcccatgggaccagttgctcctgcagctcctcctgcccctcactctgctctccttggactcctctttcctggtattctctgcagttctgtcctcggctctcagctctttgcacccttctttccctcgctgacagcttcgcgcatacctgtggcttcactgtcacgctaaggaacattctctgtggccctggcccgtctctcgagcctgagccccatgattacaacttctgtctgtaccccacagtcacatcaaccttagcatgtccagacctgcgctcgtcagccgcctctgaaactctttgctcatgctttccccattcgggcagtcatcccacagtcacctggttgtacagacctggagttccccttctccaccatccccacaaccagccagtcgccatgaagttcagcctccaccagtgttccctggcctgcggcagcagcctcttaactgtcctccctgcctgtgtctctcgtctgtaatccaccctccacacggcagccaaaatggcttttctagaatttcgatcttgtttcctttgttacttcttctgtacctgaccacatactttcagacaaaatttcagttccttagcttgcaagaccctctgagagctgggtgttgcccaccttcaccgccccttcccgtggtcctccatgctcacactgggagctccctgtgagagggaactgtcacccttccacttcctgggtcactgcggggctgccccgtgagtttcacatgccggccccccttcagtgctcgcacgtccaaggactcggcccagatgcagccttggctttcctcgccaggcaggattaagtcccacacccctggacccctgtgggctctgtcctgcctctccccacatgcttgccagggtgcttaccggctgagggctcagtgtctctcctgcccctgccatcccaccccctccatcctatgcccgccatcccatgcccgccatcccacccctgccacactgagcacctgaagggaggaccttcttcactggcctttgttcccagtttttggcctagagactgacatagggtacctgtttgctccatacctgctggacaaccagacagatgcatgctgggaggatcgcttgctcaaagactctgcccatctcccccaggcatgttgctggtccttctctccatttctataggatagaggtcacattcctcagcccaactcatggctttccacaggtgacttgtcctgcttttgaagaggcagctcacttagcctctttcttctccctcctcctctgttctgaagacccaggccggcattaggtgcacgtgatcctgactgcctgatgataatttcccatgatgaaagtatcagagccaagtgccatttccctttcattgaaattagataaaacccagagctgtggcttgcaagtgatggaagtccactggggaaatgaaaggtgccgagagaatgggacccattataatgaaagcatttgcgcagccagtgattccttccaccccgtggctcctgtgttcctcagggtgcaatgaaatgtgaagcaggaggacctttggaggtggtttgaggaattgattctaattggtaatggtggcagcattgtgtgcttggagcatgctctgcggaccaggcaccgggtgtgatgggcactttaggaagagccatgggtcccccgggtccgctgtagctcaggacctcggccccgctgtgtctagtcctttctactcctgtcatgtactggacatgatcagaaggtgtctccctcccttccaccctcctcctctccatccttccttccatccttccttccattcttcagtggctctttgttcgtattctgtatttgtattagcatttaataaaaattatatactgataccaaagtcagtcaactgctagaccttcaaattactcatgaggcctaagaaaaacctatgtgacaaacataggatggccagaaaagtctgcatgatttaattttataataatttttataatgatacaataacaatagctaagttattttcaacgcatcttagcctctacttatgaagcactttacatgcattttctcgtttaattctgacagccttacaattcaggtgttacctccatctcacagatgaggagaccaaagctcagagaagttgagacacttgctcgagattgcatggctgtaataaatggcaggagcagaattgcctgtaacatagaggcagaaatcatatcgagtggcagaaccaggtttcacactgaagtctgactgcagagcccaagcttttaaatatgttctgtgttacagggccccgtgacttcaaagggtttgattcccgaacagaaaatacaggcttactttttaacatagttaatagtacctggagacgtcttgttgtcacttatgtgcccttaaaacagtatcagtaatcgaattgctgcagatttctgagatgatttttacagttgttcaatctgcctttactttctcccttttgtgtttttagatgcatcatcccattcagatgaaacctgcagatagtgaaaagtccaacggtaggtggtaaccaactgtcttgcttaataataatatctgctgctttaaattacaaagtcagttgggggcgggagaagccggcccagctgcttttctctctagaggacagagagcgctgctcctggaatcttctctgtggcctgtgtgtctggagtaatgcactcgccactctcctctctcctgtcctgttgatgatctctggcgtaaagatgtatgaggctgttacaagcagtggctttctgtgtccttctctttgggacttgccctgtatagggaccctgtggcatttggttcctgtctcctccaacaaagcaatacagggacatctcatggggatccagaggacgtctgcaggaaaggaattgcccatgaagaattaggctttctgtgggtgggggaggggcgttggtttttgtttttttaccttttgcatgtgtttcttttggacttggagactgccttattgtactcttctctaaattgctccaatgcatttgcatcagaattcagagttcagtctgctgattaaataagcgtacacttggtgcaaaaatctgcatttgatgaggtccataaacaattgggttttgcctattcgagacatgagagagttgatagccacatttccctcttttaagtttttgttccctttcagcgaaccttctgtcccttttttgtacttttaatttactgaaatgtatgttaaaagaatcttctaccatcctagactggagagctgctctgtcccataagactgacataatcagtactgtttccttccagcaggcagttttgcacctcattaattagtaatcagggcagaagccatgcacttagagatctacgtatctgcaaatgtaaattatgattgggctctaaatctctccacaaggtattttttgctaattgtagtgcattccattttctggcttctccacagaatagaaagttttgaagaaaattccaagtcatagcatggtgctgccagcacccgacttgtcagagctttcttctctcagctttcagcagaaggcagcggcccatacctgtagttgaagctgctcaggaggccaaggcaggaggatcccttgagcccaggagttcaaggccagcctgggcaacatagatatataaataaagaaaataaaaaaatagcttttctctctctaggaggagactttggtgctttaaccactgtcttctcctcagccctgcactttacttagggttaattcgtttttttctctactgctttatcacaaacatgacacttagcaccagaagttgtcaaatccgctgctgctctgtggccctgtgagtgagccacgccactcctgtagtcaccagttgttcatcagttaccgtgtgccacgcatgttgctaggagctggggctgcagcactgaatagaaaaaggaagaagaaaagaccccaagagactgtgtctctgaccttgtagaactgacattcagtctactgatttaagtatccagaagtcacttaaacattgaacttggatttctgcagttgtaaaatggaattgatggtaactgtctcacctaagttgccttcccctgagcccaagactcaaataaggtgtttgtaacagtctctgtaatgatagaatgcctctatgaaatgttgattactgtttgcacccagaggtggtctcctggcctctgcaggctctccatggagcgtgctggcctgggaagaagaccacttcacccaggcgggctcctttcagcccttgtgctccagaggtgcgtgcttgcagtctgatgacttccttggtgggagacacgagggatgactcttgtattttgggatgaatcctgttggtacaagtcatctcagagtgtgtggccaccaagaaatgttccctgcctttggctccatgatactctaaactgtatttagagtattcaggacaaggaccatgaagtgaaagtctatggaaaagggtttgtctcacttctgaacctttggttgtagatatagaaacatgacaaattagccaaattgaaaacatttgacctgaaatatcccagtactgaaacacaaagggatttttttttttttttttttttttttttttgcattttctgctgtgcaggtattcatttgcctcagagaaccctttctacaggcagctgccaggagtttgcagagtgttttgttgttctttctgtccagtgtccactgtggtccctgagaatcacatttgctttgggtctagaatcacagcacataataaaactgtcatgggcacacccaatgttgcatgatcacagaagccaaggaggaccgggcaccgttatttctaggataagacggttacctgaaaatgctgtttttcaagcagcagcctggggtagcagttatgaactatttggagaagcctggatttgacccgactccacgcttgttggttttgtccttgggcaagttatttaaccttactcagcatcagtgtctcttcagctgtgagagggggctacagtggtgtcatctgaacacttgttgtaatgcccgtcttacaaggttatttgaggtttacataagttaacgtctataaagagctcagcataatacccggcacgtggcaagtatccagtgtgctaagttctgctaagttaacactgttattccactcaccgaggcagccttttcagtgcactctgagcagcagaggccggcctgtccaggcctgggctgtttataccgaagcatagctctgtatgtacaaatcaaaacccccaagtcttctagttgggccagtgctccttttgctttgcggattgaccttcattttctgaattttcagtaagaaaagtccaaaaatataaatgagcggaaggctgcttttaaatggcttttctttccagaggcccaaatggaacctcaccttgcacagacatgaacagcttcgaggttctctttggacctgatggaggaatcaggaggaatatgtagttttctaaagcgagtgataaaagccacaagccttttctaatttcacatggcatttttgacaggtaagcatagtttcaaaagctcaaagagcacaaagatttctttggctcagttgctctaaatagctcctgtagttttgaaagaagtataacgagctctaattgcacttttattgagtttgctgacatttatggatagcacaaaggactcatcacagttagacagttactgtcttcattatcactgtgttcagatttctaaaactttgtatgtgctgagccagaaagagctgctaatcatggattaattcatgatggacaggtgaactccagaaaagcagtcacccttggcagctttcgtccatcgagcgattctgagagagggaacctctggggtgagccccgaaacgttaggttgcgctcagatcagccctgcactttgggatgtcactgagcagacttcccgagtctccatggcttcctgtaacctgccctttccattggctctgatttaagctgcagcctctggcacaccgatggaagctcgcggcatcgtgttttccatccacgtgctcccacagagccaggttgtccaaaaggaaaataatcccactctggagaagcaaaaactgctggggctgctaagaggagcacactgagtaaaccacccaccttccaacagaatccgccttttttgttatttttccattgcagaaagacgaatggcgggacaggcagggcttttgaggaggtgtggatttcatcctccatcataaacgagcagaaacatacttaaccctctttcatcctctatgccatccagcttttaatcctctattgctgtgcccaacgaggtaccagctgtgcagtactgaaagtcacaagcagttgctgaagttaggctggcagtgagtgatacaaacagaagctgcttcggttctgggtctggtctcagaggctggagctgtgctcactctgatgtctttgcctcttgccgcaagggaagttgcttgttgtttttactctatatacagagcgtaaatccatccatcctgctttaaccctccaacctcacaatttgctgggggtctttaacgcctagaacccagaaatgtcacttaagcctgctgtgtgtgtctctctcaaggcctccaaaacctccagtgtccaggtgtcaagttcagagctagcagcagtcaagataactaaatatcatcagcagagggtgcagacctgcaaagcctccattaaaaataggaatcatggggtggctccatccagtcactttctgattcacgggaagatgaagaaataattttgaaattcaaagtggagagacttacagatttggaggcagtaattaaatgccatatgttagcactaacacattgaaaagttgttaattaattcaggcagccccaaatccaggtgtgactttgacagattgtacacgcgggtgttagcgcagacttacaattagagattttttttttaaatgaagtttctattcccctaacttaaaaaagtcaccccgtgtatttaaagtattaacccattctcatcatatcatggaaggtagacttcaaatggctgctggtgtggaaccccttttgattctgtggtcgtcgttactaatcacgggggaccccatctgtgcagcacttcatgtgtaaaagcatttccctgcccttattcagtgtccgtcatggaaaatgacttttacccttcaagtgtttttttgttttgttttgttttggttttgtttttttaattccttaaagcacctagcagaatactgtgaacacagtgcgtttcatttaaactgactttcctgtaggttgaaaaaataagtgagatacttagtgcccgtgaatactcaggaaaaactcaccaagacggtcatcaaaagttgataaaaaagttaagtgaactcaaaataactgtgttcttgtagaatgtttacaaagctgttagggaccctcagaatgggaatttgggggatgaattgtatgactaacttgtcactggaaaaccaaaaaaactcagaagaaagccgggtgtgttcagtattccccatattgcctttaaagcaaacacagcccaactgttgaaaccacggagcaactttggctagtaagagattcccaaagcccagcacttctgtgcacacgcacaggtgcgctcacacgccacacacacagatggaagttaacattttgataacgtggatgatggaggtttccattttttttcttggctaatacttgatatttttaaaagtgcgagttatctttcttcttgttgcctggctgagttgaccttgagtgatggctaggaagtcagcatttcttcatgagtagtttccattttcttcatgttcgtcttaggaaaaaaatcatttttaagcttacccaggagctgcatggttaatttactatggcatctccctgaagctcaaaacctgcaaattgttttagctaaataccataattataggtttagcagtgaaaccaaggacttggtgggaatttttcatttgcttttgtttaaaagaactaaaaccagattgttcagggtaagaagaaacacaacaggaattttatttttactctcataaaaatgccagccatagtttgctgggggtaggagtctcggagacgagagggaaggaggagtcctgctgatttttctcccttttctaccccctttccatcccatctctccccttcctgtcccatctctccccttcctattccttttctccccttcccgttcacgggaatgccactttctcacagggcctcccccaccagaatcctcccatgttagtgagcacaggcggtgtagacggcctgcagcaggtggtgtggacggcctgcaggtacactcgttgcccagggtatctggtgtctctctggcttagctgtcgcgcctgtgctgcccatgactgaccaggcttcaccagttcacagcggatccatgctactttgccttctctgaagggaggaaaaagaacttgaattagaagttttccgtcagcgtacaggaggtcaggtcctcagcagtctccctcccaggaattggagcccggggtgcctgttgcccatgtctcctccgagtctgaacacaagcagtggctcaggccagctgatgctttcctcactgagctccttctctgcacatgaagcggaagatggggcgtgccatcctgaggtcgggctgctttccgccatccacccaagccaggtccctactgccccgcactgtgcaccttgcctggttaggacctctttgctctcccacctccagtctctccagacccttcgtccagcttcaattccacatcccccagcgagcctttctcaaacacctgggtgcacgattcgtagtttacaagtattgtggaatcgtgcctttcaacttgtattccttggagccctagagtttctgcggtgtcccaggagctgtcacagtggggagagagctgggtggaagggattctgaccccccactcaccgtccctgcctcaagagccccagtcaccccgagtatgtcacaggccaccttctctccatttctaggagagaaaagagtctaaactttcattccatggatgacaaaacagaggtcctcagaggtcagcctattctccaaagacacatatcaaactcatggcagcaccggacctagaaccttggtcttctaatcaccgccattgctctccccttcaagccttctctcctcctctgaacttggaggagacacagcaggggaaggaatccttggctgggaggaggactccaggctgtgggccaggctggatgaccctaggcaggtccctcccccgctggaccttgggaaatcttttggagacagacagaagctcccttaggtctcttccttccactctgggatgctatgaagaggagcctttagctgtctcctctaggcccttcagggccgtgctggctcatggagcaatcatgtgtggctctttaattaaaattacattttagaaaagcacttcctcaatcacaccagtccctttaagtgctcagcagccacatgtggctttagtttctgtgtcaacagcactgtggtagaggaacccacctgttaccagtacacctgccccagccccttctcagcacagaggtgtgctttagcgtccagaaggaactggccccagtaagtctgggataattgcctattcgctaaatgaaaatgagacacttcctgtccggggtaggcataaaagaaacagaaataaaagccaattaaataggaatgacaagatgatagtgcagattcaaaagaaataggtatgcacaagtgacttaaagcagagtcctcctctagcccaggacactcttcagtctggctgcagctggctagcttcttttttttttttttttaattctaagaaatagattgaaatgaaacgatggaaaagaagcaggacttctccccgtgggtgtctgtgatgtcctaaaaaaaaaaaaaaaaaaggcacctctcctaaaaaggactccaaacgctgtcctgagatcagttttaacctcgtctttcgggccgaaagtagttcacatttcccgagcacaagcatggagattttgaggaaaatctcccgggccctgtgaagtacaacgtgtcttatcttccccaatgtcaggtgcccaggttagaatttgcgtgtcgtcctcatgatccccaaatgcacttttattccccgagaatcttgcctcccggtggctagtacagtattgtttccttcttgatcatttgtgaagggctggaagctcggggccatccagggtgtttctccagcagcagccgccctgttctcctctctagaatcggcttcctgttgagcggtaactaacctggctgcttagaaccaggtgcgggacctggttagcactgcatcaccagtgtcacgggaaagaggtactttcctagctccccagagacgtaagaatctctctgatctcttattcttgtctagatcagcagggatgaagctatttgaaacagaaaaatgttttcttccctcgaatactctgtgaaaagtttcattcgctgtttcgctccatctgcccccatcgtctttcctctcctgacctttctctgtccctgtcattcaggttaaaagaccatctacaaaaaaaaaaaaaaaaaaaacagaataaaatctgtatccaaaaatatccccagagaatggtagtgttgaacagttatacaagtactttggaattttagtcagcgcattactgttagtttctgaataggagaaaagaacttaacagcattacatgtcatattaaaacattttattagtaagcacaagcacacggggagatgggttcaggaagcaccaggtgggagggagtggcagggtggggcgcatggagggaggaggacagctggacgtctgcagagttggccttgggacacgtgcttggtctcacatggctggggcctggtttgatggggtaatgaagcattgattacaagaaaaaaagatgaaatggcctttgctcattcgttatttttatctcctagctgtggaagacagaaaattgttcataggaatggtttcgaagaaatgtaatgagaacgacatcagggtgatgttctctccatttggccagatagaagaatgccggatcctccggggacctgatgggctgagtcgaggtgagtgtgctgtctggaaagcctctccccttcagtgctaattggagctctgtgtcacagtcgagacagatgtaggcaccgcacacggcaagaggtcaccctgtaatacatcccatgtgataaagttatccaacctgaacttttcaccatagctgaaatcatcaccttttatttctccagttcagaaggccttggtgccaccatattagctcaagttatcactgtcaggtgtgaagccaacaggctgccctactgctaggcatccttttcaatctcatattgaaatggatttggtggggggaggtgcaagaaggagaagtagaaaatgagaaaggatatttgttgttttcatcttagtcctcgggcttcctgcctgtgcctgaaagaaatgttaagagtatgttaagagtacagtgacacaaactgggaaaaaagcgtcaatgttcacatgtagtgcagagcagatagggatgtagggtaactgggcctgtattggggtattagagttttatttcaaagagcaaaactcctggagtcctgagccaggggaactcgttaagtgacagaaaagcgactttaccctgaagaagattgtaggcacttctttgccaccatgatagaagcagaagctgtagctcagagccttgacgataagctggtgtttacagaatagttggaaatcactgttgttttccctgtttgcctctcccttgacaatgccacacacctccttcctggaaccactcataaaggctgacgctggaggttgacactcgtctgactgcacttccctgagtcagtccaaggtggaaatgtatatataaaatgtgtttttcacttctttttgctctgtcgccaggccagagtgcagtggcgcgatctcagctcactgcagcctccacctcccaggttcaagcaattcccctgcctcagcctcccgaggagctgggacgacaggtgcacgctaccacgcctggctaacttttgtattttagtagacatggggtttcaccacgttggccacgatggtctccatctcctgacctcgtgatccacccgcctcagcctcccaaagtgctgggattacaggcgtgagccaccgcacccagcctgtgtttttcacttcttacaggaaatccatattcttagcaacatggagaggttttcattctcttattactgcagttaccagtgcaatttctttggggcaaatgaggaacttggtttccttctcaatctctggctctgggccagcactggcaccccaaaccacatgttgaaagaaaagattggatcatgaggatgaaagcactcgtcttcacccttctcactagtttgacctgacttcagcaccatgtgaggaagaacatttgctcttttgattcttaaacataaagcttaaagatgtcagctgctagaatggaaggccgagagaacaaaagttcccacctacaaccacctccagagccccagcatgaaggtagtctacaggagaactaggaggcggtggaaccacgccaagcttttgattcctgtgttttcttcggaaggtggtttaaaaaaaaaaaaaaaaaggcggcatggaaatcagtttatgcattctctaacaattctgaaattttgttatataacactcacttaaaagatgtaattctctaaaagctgaacaagtcactgtattgagtgtgatcctggaatagcagatccagtatccggggctcctctgcggtttttcacctgtgccatcgtcaggggcaagcaaagccatccatcgctgtggcagactgcaccacctctggctcccaaacagcctcaccagccaagggatactagcatgccttcctaggggctcaaaccagcagaccttctaatcacacctggtggtccaattcttcatcatatatatgtccacttaagcagacaagccaggagggagaataccatgggaaaagacagtgtggctaaattaagaataaaatatgtagaaagatgtgatcatatttttgtgattccttttctggtgccaatttagtagttagaatccctgttatctcctgttgttattctcagtcacacttcagtgttaccgtagtaattttcattctccaaggtatggagaaacggcacaaggagagcccttaaattactcatagcgaaatctataatggcttaggggccagtgaccccaagttccagacccacaacttctactgaaatgaaatagaactttagtcattttattttcttacctctgtcctgagctttccccatttgtaaatgacagccgtaactatatctgccctgcttctcttgcagggagtcattcacggctggtgtgctagcttttcgtctgagcataccctctgcatgtgttagcggagagaccccgggcgggcagtatgtgtgcttgatttctgctccccgtctgctggcctggctgatctaggcagtgactctctggcacattttctctgtctgtccagtggggacagtaatgaacaggattgccgcctgcagcgttcagagctccttgagcatacatcagttatttctgcagatcaggttttaaagcagccagaacctccatgggaaagagcaggacacgcagtacttaacaagagaacttagctaatttgatctgccatttggttgattaaccagcacttgacaccagaagcagcctgttcctgcaacaagtgatggggagcagtctcatcaatattttatgcaaacgctggctcagtggaaagaggagaaaacttttccctccccatctgttttttttttttttaaacagcagaaaagtaatttctggtgaactgatgagaattccctgttgcaaaaaaagaaaaataagaaagaaagaaaatactcatttataaccatttatcctgagaactgaagacagacagtggtacttttttcaattcgcaggacccagggactcctggctacaggggcctgctcctgaatcagtgtatttgttaaaagcacaattctctttcatgctaccattttgctttcattaaagaattgcagttttgaatcaaatattaatgtgtctcccattagtggcactgcagataaagggcattcagcatttctgttctcagcgtctattgctggctcagctgtttaaaaataaataaaaattaagtgaaacaaaagcatggctgctctgcacagtaccttgtaacacaaaaccagggtataccctcttccgtgagaaagttttaaaatcaaactcttggattatggtgagggagagggtgcagctgagcggttcacttttctttttctgcttttgcccagttcacctaggaggatgaagacaaaggaggcaactagtctagctggctcctgcggatttctaatgtcatttcttccctgccacatcagtagtttcaggtcctccctaagaggggttacactgaggtttcaccaggctagttgacccagtacccccactgtgtcagagaggtacactgccctgacccacagctgtacccatcaagtcgtgctatactttcagtcggaatcactgccttttttttttttttgtaagtcgtgatctaccttttggcaagaaaagaaagtatttttaaaatcccatcttactcagcggccccagcccatgttccagggcagacaccctcaggaaattgtcacgactctacgtggaaagcacctaacacctgccaagcacctggagcctctcgaagatccaaggactcttcctggcttgaggcagcgtagccatatctcagtatgcgtttctccctttggggaagtaacccattctgccatcttctctaatttggaaaacactgagatgctttcaagcaactttgggatgctcagcaccttctgcagcagctgctcagcctctccaggcctgctgtagaagccttcatggagaaaaggagcaggatgccatgggcccacatgtggcaattcacatgaggtgtttgctctcagaagcagagcctgaagtttctaagccaaatgtgcttgatcgacagcatcaccctagcatgttgatttcctaaaatacacacactctcacttacccacaatcccacagtcagcctgggctatttaggtacagggttttctgcaccgtggcagttgaatatctgtaacccagagacagtaaaggagtttaatttttttccccccacaaactgtaggcaaatcttcactgccatttaaggtaactttctgcttgtttaagaatattccagctgtgtttatggtgttccaacattcccctgccaaaacccttgacaaatgaattggcaatattttcagggatgttggcaagtacagactggatttagctattaaatcctcattggtttttgtcatatctgatcagaatacaggaatgggcttttgactattaaaacatgtacacagtgcttgggaggctgatgcaggaggaccacttgagcctgggagttcaagaccagcctgggcaaacacagcgagatgctgtctcaaaacaacaacaacaagcatgtacacagaaatgaatcagttttcacacatttcagctctgcccacacagtacctaaacattcagatgtgtgggaactttggcgacatgcccccttgactccttactgcatttgccatcttgttccaaatacagacttccaatcttatctcagtgatgagattttgccagctattaagtaggtcctagtctgtacccagcctcgcatgccataaatgagtgatgtgtctgtgccagttttaaataaagtaactcagcatcagggatggcccatcagagtattaattcttatgccccaatattatattgatagcgtatgtttaacgttgctactgcttaaaagatacaaggaagattgactgcattaagatatttctttggctgactaggaacttataaacaagttttccataggttaaaatctcctttgtcctacacaagttatacttctttcacttgaagtatagtgggtactacacctttttcaaagaagtaacaaagaaaagcaagaggccctggcattgttcatgcttttaaaagtggctttactttttttttttttttttttttttttttttttttggtgcagagcaagaattcatctagttctcagttctcttgcagctaagaaaaaaggtggaacacctgagttaagatatcctttcaattgaaatgacaagtgtaataggtgtgttccaaaatcttctctgtgacagggctacgtgctttccttagatcttgtctgtaggaggaaattactttcagaaacctttccccagtcaatcatttatctgttttagcagcaagaaggtaacctcactgaaatgagaggaatgcagctcctttcatttctgttagcaattcgtaacattctgaaagtagggataataaataattgcaaaggtaaattgcaggttggccaaatttacagttggatttttttttgctgctatatatgtggaggttttcagagagtaatatacatgttgtcttaccaaaactccctccccaccaaaaaagaaagaagtatggcttcattattttgatacctgtatattttccccccagccttgtttctccggcatttgggtcagtagccaaattgctgattgctgagacctgacattcaacagtctagaatagttaagggctgaccctacaggatcagagcagttgtcctgtaaagacccagtgaacaccaccgcacccagaagctcatttttagtagaaaggggacagttacaacccaggttatttctgtccaatggaaagccttctggttggcttgagagaaaaagccagcagccagtcttaacggtagggacttacatgatcctgtgttagtataaagccatacattggaggcctaatcctaaagccacccatgtgttttcagtggtgttgaaacaaaaactaaaaatctatccataggacttaccgtgacctcctgttttagagaaattacagtggttaacaagctaccattgcaagaaacagttgactctgaagttgcttgacttcatcccgagtgacacagagagtgacatttttcaacatgcactcccactttataaatgacactgtaatttttttctcaagtaattgaacacagcacacaatgcagaacttgacagaaacccctaaggagacagcttctgtcttactgcaccactgccaatagaattaaaaggttaaagaagtcctcagatgtgtcagatcatttttttgggtggggtaaggattatataattacaagcatcagtcatgtttttaattgcacggttgttagaggaaagggcaatgatttgagtttatagaaacagaattttattgttctattggtaatacttctcttctgaggcctgataattgctgtatctttctcactaagttactttaaaaagttctgcatatatgaaattgtggcaaatgcataaactgtgccttattgatttttgttgacattttacatgtttcttacgcatttttaccctccatttggaaactgtcagcttggcacatggtgctggataataagagcaaatgaagtgaatacagcaatcttcttgactattaaaaacagaattagcccaggctccgcttggtttcaaatctatctccaatagatgatttgccttttcctcccttgtagtttcaagataagaagtggaaaaataaaaatctcttagtgttatttcctctgttaataatgccagggatgatgaaaatgcttctgaagagatgttacttggaaacagatggtaaatttggactggatcacctcagagctcagcatcagtatggaagccagtggaggtcctgtcctctgtcccacacttacatcatctagctgcctcagagaaggccactaaattgctgttattgatgacaaaagctacagtcagtcttagtacaggtagcgtgttcagatagtaagcttcatcagctgccatgctgtcagagaaccacatgagacagctcagcattcaccgtgagctgaacttcattcaggcttcttcaagccagcttagccaggaggcgaatgtgagatgagtttctcatgtactgagagtttttgtgtgttaaaaattatagcatgatgcaaacaaaaaatgcattgacttattttcatgactggatgtcgttgtgctttgagggtaatgggcaggcattgctttctcttattgctgttggattaaaaggtgcggctacagtattgacttgataatctcaccaggtattcgtgcagagcaaaagaagaaaatatattttatggctcacaaattgatttacataaaccaaacaatctgctggttgtttgaatgcagaatattctattttgcttattggccacaggggcaacaatctcacatcgttgatgccagaattctgcttttcatgcattcactctgaaatgacaatagacgtcagcctctcagtgtttagatctgcttcatttggaaatcttttaagtagtaataataatgttttgaggaaattgagtggaacactaaattattctctgatacctaagttcaaactgtgcaaggctaaagaagctgaaaatcaatgcacttttaaagtcattagagatcataagtgaaataagtctgtgttgctttagctaaccttttagtgtgctgtggttttattataatatcagcctgaatctgcattaatttcacagtctttttctctaagaagcccaagggtgcatgatgaataaaatgtaaatttgagaaggcagtgtttttattagtgaaaagggcaatgagccatgtagttggagcagtgacctgcatggtggccaacgctggtgcaggaagcaggagcaggcactacagagtctagttattttacagcacaagaaaaaacaggcacggaaagtttcactggtctcccagcagatattcacagaagtgtacattgtcttgtgtatgttagaactaaggtcaaatctttgatacgtttcagaaattgacaagtctcaaaagtcttgaagattttatgcaaataaatgacaatgcacgttttttacattttatagcagtattgaatattctcggagtaatggagcatttgtttttattaaaattaaaaattgctaaatagtttgcaacagacttggtatatttgtatttgcatagcaacaatttatgtttatacatacatatatattttttaactacctggaagggatttagatacatttgtttgctgacattttgagctcttgaaatttatttgctcatttgcccttggtgtgaggattttcttatttgcccctttaaaaatcaatgataaaatttgaaatacaaagccctgatgtgtgaatgccctcagtaaagatcatcagtcaaggagaaaatggaaaatagcaactttttattttagaaaatgcaaactagatcttgctgatttcaaacccggtggctaaaaacagtacccaacttcctcccctagtttccatttaaaaaataaactaataaataaataaatctttctgctttggtcagattagcaagtcagcactgtgaataaaaagcaaaataagataaaaccagagagagaagttgttttatttttatgtactactgagaacagtgtcgtcttgtggcagttctcgtagactgtgttggtttaacaagcgtccaacccttttgtcttgttgttttttgtctttcctgctccctgtccccttgtttcccacaggctgtgcgtttgtcacattttctacaagggcaatggcacagaatgcaatcaaagccatgcatcagtctcagaccatggaggtactgtatcatctgccctttctttgttttctttgtgcaaatgatggggaatggtaaagcaattctctcctgtgtggattgttcacatgacaatcacagatgtaaactttcaccatctcagttttcattcattcattctcattctctccttctctctctctctctctttctctatgcatttttcccctaatgacttgaaatgcatttaggaaaaccttccacttgctctccagttatttatttgagccttttattgcagtggcacgggtcctgtgatgtaaagtcgtgagcactttaagcaaagtgtcattctggacctaaagaatcaaatacattccccacaccggggtcggtgcggatgaaacagtaacagcctcccaccccaaattactgcttgccctgtgctaagtcccagggttctttcgtttgtacagggtcaagttatcttccatctagtcaaacagcattgtgtttttacatcaagaatgttggagaaagttaatatttctcccactgcatttaacattgaaagtgcaaatttggaaaataggatttgtctccttccttaaaaagatgagcaataacaaagaaacataataaaggctcaaatgtggtctcctaatgagagatcatggctttaggggaaggtaaacaccctggtgtggatgcacacccacgaacctagatagatggctctgtacttttagtctgtgatttgggtcatggcctttcagaattttgcacaaaagcattccaagagtgatatgccgttacttcttctgtattgtctgatagaatcatttgggagtgcatgttctgctgtattatgtatactgtatctttgtgtatgggtgatcttttccggaggtggccttgtggtgttatctgaagctgtgttttcatattttgaaaaaagatattttcaattttatttaatatgcaaaaaacttttttcttgattgagcttctgttttccccccattttgttggggttttatttttttgtttgtttgtttttgtttgttttttgcaatgctgcatctcccaaagcatgctgggagctaagtgatcattatgcgtcatgttttgtgggcaactttttttatagtgaatcaaaaggtgggtgcaaaggggggaaggagtgtgcatggcattgtcattcagtgtttactgtacttttctgacttgtgataccagcattgcaaagcctattgtctttttcgaacattgatcttgactttgatattcctaacatatcttatataatcactgtgttttcctttcagtgcaatgcatttttaagacactcacaaccccctacctgaaggcaagctcaggtgaaaatcgggcatgataggcgataatgagcaggatttggaatgtctaggaagctaatcttgtctgacacgcagttacacgtgtgatggcgttttgcttccctctttctcttactgaggccgctccattcctgtggattagcctgatttccagccacattttaatcttcaattcagtttgaagattaaaatgaaactgctgttaggggcaaaaaaataaaaaagaaaactctttacttgtattatcttccatatacgcgtttcattcttatttttatttcttgtaatttagtgatgtgtacccaaattggtctcacctgagataattttgaacctcaattcttcagtgtttctgttagaaacattacgatccccattccttcccttggagcccccccagtaatgctcagagagccacggacaacccacgggagaccatgttcccctgtgttcctgtagaaggaggactctggatcataaagcagaactgggcatgaaccaggctgagaaacagtaggttcccatcatgtaaagagttggtttgaccactggggcatatttattcctaagcctttgatcctttattattaatatctctgttatttgaaaaccaaatttggtgtttaaaactggacattcatgcttacacagaggggtcctctgacacttaaatttcttgtttggttttttttttaattggcatttaaataggaggttatatattatgcagtcacattataattgtttgactaacgttgtttatttttaactaattatattatttccaggactctggcatacatctttaaccaagatgtattacctaattcacaatgatgtgaatgttgaaagaacaaggtcttaaaaacaattaattttatatcgtgccttctgtttctccacttgccttcactctatccctgccctgtgtttcatggtttaaaaaatcatttttaagctataatcattggcctaattttctgcttttatatcatttttactatttaaggaagaaaaaaatagatgttctgttaggagagatgctataatttgttatggaacaaatttgatggaacaatgacaacccttttccatgcaaaaccccctctctacataatcttcaaagtatgttgctctcttttaagtgaagtactgaaacatggaacagatacagaaaaaaatgaattacagatttttttaaatgatggaaatactatttttgtgcaatttactgacatttaacattctgtaccatgactctgtctaccagagctgaagaccagtaggctggaagtttaacactgaaatattcatctcatttttctcacttttttttattaacagacatgatatcctcatgtattcagaactgcatccccagtaactacccaaggtgataaggaaaaaaatgcgtttgttttccagaaaagagaaacatgacccaaagggaatggaacagagaatcacatttaaataggaatataacatttctgagaggagagagagagaggtctattatcatgctgagtttcaataaaagtttttattttaatcacttgggtagaattacttctttatgcctcagcaaaattgaacagctttaattgtgatgaaacgtgtaggcaagccacacaaaggaggagaagaggctggggaaggagggggagacttctgctgagttacttaccaagtggcaaatgttgcaaaggtgctttggaaaggaggtcttcgtgcttggggtgttaggcccttattatccctgatgattttatctagctcagtagtgaattctgtgacctttagccatttctttctcactacccctactccttgccttttaaaggaaattaaaactgaaagaagctgctagaatggtgagattcattagggaaagaagccaagtggactcctccgtctgctgttcacggtctatcttctttggctagaatgtgcttctgttttttgggtttgcaccagctccagggatggcgggtagcacaggtgtgctgagggaagaggcctctctgaaaacgtgaacggttactttggagaatgcctgtgttctctgaatatcttctgccctcatcctcaaaactaaaatgaagcccttttccctatgattgctgggccgataggattgtcacaatcccaaagttcacagatacataactgaaaacgggaaagagtaaaagataaatgaatgagagacatggccattcccgttacagattctcccctttgtcctctgtccacctgtggacacgggcagacacacaaagccaagtctgtctttaagacgagcagcctgagaagctcaattaaagaaccttggtaaggtctgttgtctgtaaggaggtcctgcaaggttgaaggaagacacaggaagagaaggagaggcagttactaatcagagcaagaaagcaagtgacttcaccgaccaccagatcccccaaagaaaccactggcagtgtctggaattttctgttgatggtactattcagagaagaaggaatatcaaaccgttttaaaccatttcagcccattccatgtgctccaggctagtgcagaaaggtagctccggtgctgagtgtcgtgagcggattccgccagcctgtaaccccctctccactttccaatgtgtctgaccacagggctgctcttcacctatcgtggtgaagtttgctgacactcagaaggacaaagagcaaaggcgcctccagcagcagctcgctcagcagatgcagcagctcaacactgccacctgggggaacctgacagggctgggcggactgaccccacagtatctggcggtaagtgctgggcaatgccggcgtggtcttcacccgctgaaactctgcaaactgacttttcccctccctacgctgaggcatttgttttcagtacattttcaatctcggggaattattgaaatcagcatttatgcaggatatttttccaagttagattgattctgttaagaacaggactaattgaattcctgcctgatgtaggaggggcaaagtcccacaggttaaacttctaactcgtctttgaaaggcaccccaaggccctgagttagaagacatgcagctgatgatgtaacgagagggaggccgctgggctggctcatccctgtcaggtcagggtctgcgccagcaggacctcaggtgaaatctcccagaacttccattccatgatcctggctcttcgcagtggaaccagattgatgaaatcaagtgtttcttacttcatctatttgaaaccaacaaaattctattctatttcaagccccagcagacccagttctctcagccattccttacatctcttggtgtctgaacttgagctttctggttgtttactcatgctctccatttcactttgtgtctttattgaaacacagtgaccagaatttaagacagtcccccgagcgagatctgaacaggacggagtagtaacctctagtgtggacttgagggcatctgaatggagcttgagagcggcgtttgtagtaaccatggcagatgcgggctggaaggcagccagtactccagagattttatttttactcgaattactgctaaattgtgctcttctaccctatttttccactttggaacataagtgctggacttcacatttattaatataatttcatattgtgagtttgggccttttattccagcctcagagagggtgtctctgtgtgtgtgtgtgtgtgtaccccatgtgtattgggtcttcattctgtcattttacattttaactatccctcttgtgatcctgtcacccattggctttactttgtagcagaagttgtgcttttgtgtcaaatgatcctccctattccaccttggaaggtgagatgatcctgcttttcggacatatgaggaaagggagactcaaagaggttacgtaacgttacccagaatcaaccagccgctagtggttgatgggacttgagccctgcgtgtcccgccggctggccatactgcctctttgaggactccgggtgctgctgtgggtcaccttcatctttttagctgccccacccccagtgcccagtgcccagtggggtctggtatataatagctcttcagtacatatttgatgaatgaatgagaagcatccttttcctgtcttcctctgtgctgctagcaaaagcattggctcaggttcccatcactttctgtccatttctctaccttgtccacgaagataccatgagagattttgtcagctgtcttgctaaaatctatatttgctctgctattattttcttgactaatcagtctaaaaattgctttaaaagagaaatgagtctagcttgactatgatttgtttttcacaaatgtgtgctgttcagatgctcacagtcgattggtttaattctgtgtaccagaatttttgtctgaggctgacatcacgctcaccttcctgtactttctaagagtccggcttcccccatccaccatttctgaaaactgagacacgtgtccactctgtcttctagcacgtctcctgtgcccccacggctcacagaaatctccggcacatgtttctgggaccacatctgcaaattgtttgtgtaggtgaaggagaggaaatctcatcctgatttatagaaacatgtttttagaagttctcactacgtttccctctgccatgggtgattctttcttggccatgtttgtcctactccctttcagctgaaaagccctttctctgaaagagcccttagctgccttgagtgatagattctgaccctggctcaccagaggttggttatccgtggcaataatcctgggtggtggtttaatgacactccaggtatttccacttacctcagtaggtgctattaactcctctaaacatcttcaaggctagcttaatttttaaaatttaaaaacattgaatatgaggaggaagttgcagttgataagcgcaagagaatgagaaacccagcaaatcaaaccgaaataaggccttgctattacagtgggcagtccctagctttcccaccccctcttccccgctctcttcctctttctgtgtgcgtgagagtatgtgtgtgggcagggaatggagagggatgactgaacacagacttttcttggttttagtataacctgatagtgtgaagtcccataatatcgtcgtacctgaggcttgggtttcagtcagccaagggtccccaacccctgggctgggtaccagtaccggtccatggcttgttaggaaccggaccgcccagcaggagaggagcggcaggcgagagagcgttactgcctgagccccacctcccgtcagatcagcggcagcctcggaatctcctaggagcacgaacctggtctaaactgcacatgctgaagggtctaggttgcgtgctccttatgagaatctaattcccgatgagctgaggtggagcagtttcatctcaaaaccttcccctcaacccctggtctggtgggaaaattgtcttccacgaaacttctttccccggtgccaaaaaggttggggactgctggaatcagccactgatagttccacactgcttggcgctgttacctcaattgagatccattttcgagtcatatccatgtgtagggtttatcatatcaaactggaaagacctggacttccccagaggaacggtgttctggattgtttcacgagccccaaataaattctgaaagttttgtttttttgtttttttgttttttttgagacagagtcttgctctgttgcccaggttggagtgctgtggcaccatctctgctcactgcagcctccatctcccaggctcaagcaattctcatgcctcagcctcctaagaagctgagattacaggcatgtgccaccacacccggctaatttttgtaatttaactagagatgggggttttgccatgttggccaggctggtctcgaactcctaacctcaagtgatccccaccccccccccaccttggcctcccaaagtcctgggattacagatgtgagccactgcacctggctctgaaagctgtttttaaaatagtgaattaatcttgttcctcctgagcacacaatgtgacaatatttcagtaataaaataaatgtggtaaatctgtgtttctggtatccatgtacatttgaatataggagaaaactatctgcttgcccacactgctaactgcatctgtactggtctcccttaccaaaaagaagatccataagttcagcccaacactcagtctttcacctaagttaagctgcggttcagctgagttggacaagtccagcagcaccccaggggctccatgcctttatcttgtggcacccactcattctgcatggcaggaaaaatgcagccctgaaagcactagtggaaaatgcagactttctcataggtatattaatgtttttgaagattgacatttacaacgcgtgacttcgatgtacatagcaccagatagttgtgagttttgacaagctgtatgtttcactctgcagtgaggacttttaaaatggctgcccatttgcttggtcatgtagtggtggctgcagctgtacgcctgtgaatagatgcattcatgtttgtagttaccatgatgatctttatgttggcaccagagtcagtgaaccaatgtgcttctgatgaaagatgaagaaagctgaacggtgctggaaagtagaagagagggagggaatggaccctgattgacagagatgagttacggtaactgctagactacagagagagataattagtcacgctatgttggtttcaatagatctaacacctggttgttaaaaagagtaaattgattaattgttttaaggcagcagtgttagtttccccagtgtttatgtttcttaatagagattggacatgaatatggatttacagccccagctctggggaccttcagtccatcagtaggcagtagcaaccaaccctggaaatgcagagtaaactgaatttgtccccagtttaatgagggagttactttgctctcaccatctccactttgcccttgtgtgttcatccgcagctcctgcagcaggccacctcctccagcaacctgggtgcgttcagcggcattcaacaaatggcaggtaagtcaggaagcacgcctctccttttgaccgtgctattgtcagaatttggggttggttccgagggcaaagacaagaagcaggggaagagaaccaagaatgatgatcagacttgttagctttctgtctttggtgttaacgttggaaccgcctgctctgaagttgtctctgttacttcttaggttacctacccaccttcgctgtgcatgaccgctatagaatgaaggggctgagaaatcctgattggcatctatatcaacaaatgattatatcaacgactctctagtcatttgttgtttttataaataagattgattactgggggctttccatccagattcctatatctagggcagccaaatgattgacagccctctaaaattttaataatagacagtcaataaaaatgttctgacctccgtaatgaaagccaggattgcaggcctatctttgatgcagtttgcagccccttgataacgacagacaattaacagggtgcctttttactgtagtgccccagttgacagaatcatgcatcagaagcttttatgtgaaagtggaatctttgttctggagaaaatcaaagtgtgactgtatttgaaagccagctcgttgaaggattccttcttctaatgagctgcgccagtagtaactgaggtgtggtgattagcgaaaggtcactcctgccgtgccaccttccgtgccgatttccctacctaacacggggccagggaaggcagcgagcgcaataaatcagaacacaggtgcccattaacctgccgtgaggaacggtcagagagccttttccttgtttcattccaaaaaggtggggggagagagcaaggagaacaggtttttggcatattagaaccaagcacggtttgtgttaatcaaggacaccctgaatcagtgcaatgaaacctacatgtgcagaatgaagcgttttttctttgtcatcatgaaaactcctttttttctacctttctgtttctttttttaaatatgtatccttggggtttgtttattttttttttcttgtttcacttcaaatgaatctggaaaaactttccagggggcttctccctgggtgtggtgtgtgatcggcagccccgccgttgtggcccgaggctcctggaagctcatcagctgatggtcttccttggcctgtagtaaaaatactgctgaattcctcgttgggctttaaatccattggcactgccacctggttccattgtaacatagcttttggattattagaaataggaataacttgatagttaaatcattcagcagcatctttacgaatatggtttgggaagctggccttggagctaagaatcacattgaatggttaatttatttttaattctatgaaaggagctggagagagagaagtaaaatattcaggggattttctgtgttttaaaagagaaaacctcctgattgcaagctctaaaataaatgctaagatttgtcacactttcagcccacgggagatttgcttttctcgcatagtatggactcaccaggatctgaaattaggggctttccttagaggtggcctcaggctttcctacccccacagttggattatgcagagaaggtcactgggtcctgaggctgctgccgagcgtgctgtcccgggtggacagcgtgccctgtcatctttcattaggatgtgtgtgcctgtgccgcaccagccacaggtcaggatgccagcccctgcacgccctgcgtgctcatttgaaaactgagggtatctgggaagtcaccttacaaggtgccgaggagcagatggctaatttaaaggcaatctgtatgtgctctgagcctcccaaattatccatttcttgaatcctcaatgtgtgaaattcagcacactaagtcctcacaggctaggaaatcaaatgctggacaggccattccctaccatcatctggagtattcagagtatttggaatattcacagtcttcaaggtgtagctgtcgggctctgtgaaggataccttgcatttatagggatcgtcaggtctcctcttcctacgtatttgaagtattatggcttggagtactttctccaccaatgaagaaaagtttatatggcctctcctacgctcttgtcttgtcccaaaagtagggcttaactctgtccttgccatcaatctgtgcacatgttatggagtgaccatggtgaatgggcgatagaggttccttcctaggagaaactttcccagcttccccaaatgtgagaggggcgcctctctcccgaattccccagagccctttcctcccttccctctgccctcacctccctggatgcttcaggatactctgtggatactcttccgtgctccaggagagcatggccccgtggctgatagactcagctctcacccctctaagagctgctcatgagtatcctcgagtggatgagtgaacagatttctaactcaacagacataaatccccagtggagcttaagttaaatgcctggtttttaaattaagaaatatgacttcagcaatatgtataaaccaaaggaacattaaactaatgatagtatctttacaaatgagttgttgaggatttggagatagtttgtataacataaaacataacaaatacagtagaaagcatatggtagtgggattgaagaaacccgagaggttatttatcccaaacaccacctgatgttacagtgcttattgagtgattgatactgtgtcctacgtagagggggcacataaacaattcacatgtaatttttctgtattacattgacagatatatataaaatgatctctgcatctaaaattcaagcagtccagcctggaatactatcaccaaaaagtgaaaactgattttagaaacgaataatattttgttgtgaacaactctgaaaacatactggtcgatgaggtttatagctagagtctaaaatgccacatttatatgggtgaaacattttcagcttcaggagaaaataaaaccaaaaaaaagaaagagaaattttagacgactggatcctaagtagttgcatgtataaaattgaatgagacgtcagctatacttcctttcccaaaaaatcttaccattttcccttcaaactaaaaataacttcaagtgtgctttatggtttttatccaagagaacctttatgaaatatggaatttagaagcagaaaatggattaggaacatacctttataaattgacggcttttatatctactttttgtgcctccttggagttggttggtttttattttccctcttaaaacttctaatgaaaacttgtccatttctctctcagcggtgatatttgttcagtgaatttcagaaatctcagaaacttggggtctgagtttgggctgagagctgggatttttcttgaaagagaaagggagtaagagaaagtgtcttctctgcctttaatttgtttataacaactatcaactcagaagatcatataacagaaaaacaaggggtagtgttttaccattttgtttttgacaaagctccttttaaaaatcatgcagctgtcctcatagcaagctaaggacgtgactaccactttgttactacattacggttggaaaaagggaagatgaaaaggttcagtgagtaatgtgagaccacagcactagtcaatgacctaacaaggattagggtatagaattcccaaatatcacaacaacctgatgaagtagggactctaagttagcccaccgcatggccgggcaactgaggcttagagagatgagcagacttgtccaaaggcactaagctagtaggtggcaggaccaagcttcaggtccggctcactgatgcaaacccaggctggcaaaccgtgctctgtgtctcagccccttgaggtgtgtttcacggcccccacactgttaggaagcacttcagaggtggtaacaggaaagctgcctcccttcatcctggaaaacatctcaagtttatcatgagtgagtttttctttttaggggggatttttttctaggataaagaattgttactaaaccagttccagaggttctgaagctgcggcggaagtgtcttttgatgaacgggaggaaactgcttcgtttcaattctgattctgagtaaagcaagtagtaattcccttccagaatatctggtctaagttttgaaggtaacaataacattatggagtgcaaatatttgcttaaaaccatgaagcagctcttcatttatcaacttgagatctgttctcttagaagactgtcttggtgtctagcacgagtggagaggagggagacatttgcaaaaacagtgtatcggaggtctgagaatgtcgaattggaggcgctcccggagtggtgaagtgtgcttggtacatccacaaagactcacgcagaacttggttcctccccaagctgagtctccagcagtccacactgcaggccttatgagaacgttctataaccacccatctgtcactttttaacagacctgattggcaagcacttgtaacaactgacatctgttcatgcttattgatatgcagatttatggtaattgctatgaacaataagacacaaaattacctaaggtgaacattaaattaaattttcatgcccttctccttataaataattttttttaaatcttaagtttcaagtaggcatattgcgcatctgtttggtacataatttcttcgttttgagaaggatatttttccccaagtattgaatgaaagttgaatccctgtattctcaactttctttgccatcttcttagcccatcgttgagttcctaaaacttactgaaatgttttgcatgttcagtcacccagtttattgcccctggttcgagaggtgcccatctgagcagagtgcttcatgaagtcaaatgcagtttttcttctcggaaaggaaccgtttgccaagcacgcgcccttgcctctcggtctggtgccctttcaggatgagcgtgtgggataaagtgtgacttggggtgcagactgaggaggcgcctgggagaggggctgagatggggaaaggacggggcacccacatacctcagaaaagagagagcgacagaggggaaccagaaagaggacttccggatgagcggaagtgaagcccgctgttagttctggggaggaataaggggagttgcaggagaggccccgcgccccatccaggagcaggcctgcgcctgacacctgtgcccgagaagcctagtccggctaagaagggagagggaacctctgtcctcacccagatgccctggctggtgtccgcacatcaggccagtgcctttccccaaaaccgtttctcccccgcataggaggggaaggcaggcaggtgcgatgtccacgttccgggtgatggcgctgtggctgtggatccatctgtggtgggaggagccaagacatcagccaccagggacgtgcatcgttgccagggaagggcccaggaacactggggccaagacagtccccacgctcttctcgccccgggttattactgtggtgtgacagagcatgagatggtcagtagcacctagaagatcggtaggtgcagggatgtccatggggcaggatggacagaggacacatgggccacggcctctgcctggctgagtggacagaggccgctctgggtgggggaaacggtgccctcactgccctccagcctcagtcctggttggagtgagatgcccaagaggcaggggaggtcctagggctctgaagggctgctctctagggcttcctggcgccagcctccactgggtccttccccattgacacctgtgcccaggaaggtagctaagaatggaggagctcgggctcgcctggctgcttctgatgctggcgtgcgtgtgcatgcctgtgtgcgtgtgtgtgtgtgtgtgtgtgtgtgtgtgtgttcagaatgggaggaggcactgtcttcatcctccctcttctccgtgtcctcactcctcagctctcgtttcttcctgatggcccaagtcactgccccacccccaggctgtcatgcagtgattttccactaccacttgtatctctttcagattgtcaaaagaggtcagaagttcttcagctttttaggagctgtcaccaaacacattttgcatgcacatcacacacatactttttcataaaatgtcagagtttgtggagaccctgaaccctgtcagggacctctgcctcagaagcaccaagttcaggggactgacgtggggtagatgaagaacacgacgaagagcactgaggcagcggcggacgagggtctgtctggtcactgaagcagctagagccagtggtttgtggtatctgggattctggggatggatgcagaaggaaatcacgttaagaaactaggccaggtgtggcggctcacacttgtagtcccagcactttgggaggcagaagcaggcaaggatcacttgagccccggagttcccgaccagcctgagcaacacagcaaaacccctttcctacaaaagttagctgggtgtggtggcgagcgcctgtagtcccagctactcaggaggctgaggtaggaggatcgcttgagcctgggagatgatggctgcagtgagccataatttcactccagcccggtgacggagcaagaccctgtctcaaaaaatatatatgtatgttaattgccaaattgattgagagagcaaaacgtagtacatagttaagtagttagtggttaactggttaacctagttcttagttacaaatgaagacacgatcacaagttcattcccagacctctggcattcaggcgagttgcacaaaattcgtactggccccaatgttcttggaccctggggcagggagcggcacttcatggtgaagcagcgctagactggaatccgccccagctctcacatctgttcatactgttgtggtggggcgagcaaggccactcccagtggatatggggacctggggggtagagttaacttctgggcccctgtcacattgcctttcgaaaccctatgctggaccagccctttccttcctcttcctcccctccatccgtccctccctatccctccctccctatcccttctaaacttctctcagatgcaaagtttaaggaaggaaatggataccaatgcacaggaggagaaggaagaggtcagaacagctccagatggggaccgagagggcagagggcagcccgtgggtaggccaggctggcagggagaggacaggcacccagggaaggggcggggctctctcagggagtggcccttggagaatggctcatggtgttttcacctcttcatgcccgtttcctctgtaacatgtaggagagtcacaatgcccacaccacgtggatgtgttaggaaccctagtagcagagcacgggtaaggcactgaggagcttgcctggcacgcgctttgttcttgcttctgctgtcattgtcgtttaggacagtattattgcagttattagtctgagagcttcttttttgagcttaactctgcactaggcattgtttgagctttctatgtgttgacccatttaatctcttaatcctcaagaggtgagttctacttcagtcgcactttacacttgaaaaccccaaggtgcaaacaggtaacgagcttgctccaggtaacaggctgccagtaagtgaggcagagccagctttcagcccgggtcatgtgagagcaggacctgagctcttgctgaccagcctgcgctgccttcgggaggtggtggtgattgctgctgttatccctggtgtcaccagtggagcttgtgttccaagaaacgtgaggccctgcctcacctctggtgtacaagcacttaacttcttttctctttaagacatggggtctcactctgttgcccaggctggacttgaactcctgggcccaagcgatcctttagcctcagcctcctgagtagctggaactataggcacacgctaccacacctggcttatgagcacgcacttctgaaaataagagttgggaggaccatgaaagcctcatgggtcagcacacaaggactaggagagggacaggctggaagggatgacatctcttgcagcttctcagctgggctgtgctttgctttcctgtgcttctctaccatccccatcgaatcaaagacttcagggaggatttcattctgaatctgggcctatttcaagaaactgatgaactggtgggatttcttccccactccctgacatctccctgctctgatatccagcaatctgctcgggtacacagactatcatgttttctactttatcctcagtgtgttgcacagggtctagcccatcatggccactcagtaattactggatggttggatggatggatgatgggtagatagatggatgggtgagtagatgatgggtgagtgagtgggtggataatggatggatgggtgataatggatggatgatgaatggatagatgggtggatgatgggtgggtgggtagatggatgggtgactagatgatggatgggggctgaatgatggatgggtgggtgggtggatgcatggttgatggacgatgggtggataatgggtgggtggatgatggatggatggatgggtgggtcaaatatgtcctggagggggactccctggcctgagcctagaatggtggctctgcttgtcattaatcagtgccagatcatagatggatgtggggtagatgatgagtattaaaccacggggtggaagtaccggtcggtacacctcactnnnnnnnnnnnnnnnnnnnnnnnnnnnnnnnnnnnnnnnnnnnnnnnnnnnnnnnnnnnnnnnnnnnnnnnnnnnnnnnnnnnnnnnnnnnnnnnnnnnnnnnnnnnnnnnnnnnnnnnnnnnnnnnnnnnnnnnnnnnnnnnnnnnnnnnnnnnnnnnnnnnnnnnnnnnnnnnnnnnnnnnnnnnnnnnnnnnnnnnnnnnnnnnnnnnnnnnnnnnnnnnnnnnnnnnnnnnnnnnnnnnnnnnnnnnnnnnnnnnnnnnnnnnnnnnnnnnnnnnnnnnnnnnnnnnnnnnnnnnnnnnnnnnnnnnnnnnnnnnnnnnnnnnnnnnnnnnnnnnnnnnnnnnnnnnnnnnnnnnnnnnnnnnnnnnnnnnnnnnnnnnnnnnnnnnnnnnnnnnnnnnnnnnnnnnnnnnnnnnnnnnnnnnnnnnnnnnnnnnnnnnnnnnnnnnnnnnnnnnnnnnnnnnnnnnnnnnnnnnnnnnnnnnnnnnnnnnnnnnnnnnnnnnnnnnnnnnnnnnnnnnnnnnnnnnnnnnnnnnnnnnnnnnnnnnnnnnnnnnnnnnnnnnnnnnnnnnnnnnnnnnnnnnnnnnnnnnnnnnnnnnnnnnnnnnnnnnnnnnnnnnnnnnnnnnnnnnnnnnnnnnnnnnnnnnnnnnnnnnnnnnnnnnnnnnnnnnnnnnnnnnnnnnnnnnnnnnnnnnnnnnnnnnnnnnnnnnnnnnnnnnnnnnnnnnnnnnnnnnnnnnnnnnnnnnnnnnnnnnnnnnnnnnnnnnnnnnnnnnnnnnnnnnnnnnnnnnnnnnnnnnnnnnnnnnnnnnnnnnnnnnnnnnnnnnnnnnnnnnnnnnnnnnnnnnnnnnnnnnnnnnnnnnnnnnnnnnnnnnnnnnnnnnnnnnnnnnnnnnnnnnnnnnnnnnnnnnnnnnnnnnnnnnnnnnnnnnnnnnnnnnnnnnnnnnnnnnnnnnnnnnnnnnnnnnnnnnnnnnnnnnnnnnnnnnnnnnnnnnnnnnnnnnnnnnnnnnnnnnnnnnnnnnnnnnnnnnnnnnnnnnnnnnnnnnnnnnnnnnnnnnnnnnnnnnnnnnnnnnnnnnnnnnnnnnnnnnnnnnnnnnnnnnnnnnnnnnnnnnnnnnnnnnnnnnnnnnnnnnnnnnnnnnnnnnnnnnnnnnnnnnnnnnnnnnnnnnnnnnnnnnnnnnnnnnnnnnnnnnnnnnnnnnnnnnnnnnnnnnnnnnnnnnnnnnnnnnnnnnnnnnnnnnnnnnnnnnnnnnnnnnnnnnnnnnnnnnnnnnnnnnnnnnnnnnnnnnnnnnnnnnnnnnnnnnnnnnnnnnnnnnnnnnnnnnnnnnnnnnnnnnnnnnnnnnnnnnnnnnnnnnnnnnnnnnnnnnnnnnnnnnnnnnnnnnnnnnnnnnnnnnnnnnnnnnnnnnnnnnnnnnnnnnnnnnnnnnnnnnnnnnnnnnnnnnnnnnnnnnnnnnnnnnnnnnnnnnnnnnnnnnnnnnnnnnnnnnnnnnnnnnnnnnnnnnnnnnnnnnnnnnnnnnnnnnnnnnnnnnnnnnnnnnnnnnnnnnnnnnnnnnnnnnnnnnnnnnnnnnnnnnnnnnnnnnnnnnnnnnnnnnnnnnnnnnnnnnnnnnnnnnnnnnnnnnnnnnnnnnnnnnnnnnnnnnnnnnnnnnnnnnnnnnnnnnnnnnnnnnnnnnnnnnnnnnnnnnnnnnnnnnnnnnnnnnnnnnnnnnnnnnnnnnnnnnnnnnnnnnnnnnnnnnnnnnnnnnnnnnnnnnnnnnnnnnnnnnnnnnnnnnnnnnnnnnnnnnnnnnnnnnnnagtgtgtggtgggtggatgagggatgagtgcgtggtgggtggatgagggatgagtgtgtggtgggtggatgagggatgagtgtgtggtgggtggatgagggatgagtgggagcatgatggacggaggggtgggtggatgatggatggatggtgggtgaatgatggatagatagatggatgggtgggaggatccataccacaatgagggatggatgggtgtgctgatgaaggatgtgtgagtgtgtggatgatggatgagtggatgatggatggatgggtgagaggataatggatggatgggtgggtggatggatagatagttgggtagatatgtgggtggatggatggatggtggatggatggtgggcggatgatggatggatgggtgggagaataatggatggatgggtggatgataggtgagtggatggatggatagttgggtagatgtgtgggtggatgggtggatggttggatggtggttagatgatggatagatgggtgggagcatctattccacaatgagggatggatgagtgtgtggatgagagatggatgtgtggatgacggatgggtgggaggatagtggatctgtggatggataattaagtggatggatggatagttgggtggttacgcggaatgatggatggatggatgggtgggtgggtggatgggcggatgatggatatatggatggatggttggatggatggatgggcagatagatggacgagcaaatatggatccgcctccttgattggttctgactaactcttcttctctccttttgtcctcacatccctcagatgctggggatcacagtgtcctctcctttccactcttcatctcagcttccttgactcatagtttttcctttccttgcagtctggctgttgagcagtgttagctatgcccccgtgtggtgcctcagagactcagccactccccctggactttccaggcggcagcagggaaaggcttaggagaatgtcagaaactgttggatggtaaagtgtgtggaggagaaatgaagaggaggacacccaggcccttagccctggatcctaaaggagcgggcagtggagagaacctgagtgctgtcagctcagttccaggacctttagtgaatgtcagtgggtgagagaaggactaaacatgggccctagtaagtatctgtacagtggattagttaatgattgagaggaaacagccaatatttgatgctgttgtaaataccaaagaactaataaataatggggaaaactaaaaccttggctagctctgtacagacaatactcttcagagcaatttatgtaaatgtcaaacttgtctgttaccctgtttgtttgtcttacatagatttgctcatcacctactatatatattggtgtgtgtgtgtgtgtgtgtgtgtgtgtgtgtgtgtgtgtgtttttacatggacttgaaaatgagtaagacataatttttgtcctaaaggaacttggtatctggttgggagggcaagaaatacatataaataatgtcaacatagggtatgatgagagccacgaaagagttataaacaaacagataaagaaatttgcagctaacagagaaagcgtgtgcattaaatgtaaaccctgtctccttaggaggaggctatgggatggggcagaaggctctgccaaggcccaggagggtctcctccatggctgtgaggccttggccagggacctcatatctctgacccaagtgggccagctgagccaggccatcaacacagctccatcactgaggctcctacctgggagggtcatatatgtcctggagggggacccgctggcctaagcctagaatggtggctctgcctgtcattaatcggtgccatatgcatattgtaggctttgattttggtgctaagccctgttcttgtgtgctcagccatatgttggtggtgtggtctggtcatggttcacgttagaggaagcacacatcatgagagagcccagagggcatggacagacctgcgtgaatgtacctcattccttgcaagacctcgcacagccttggtgctccctcacactcaagtcaaacatgcattcatgtgtttgtaggaaacagccccttgctggggccatgttggtctgcagtagggccaggcaatttgcatatttcctccattttcctaaagtaaaactgaaaaatgagaccagggcctctcaacacccacgttctcatgaatatggcactgtgtgacccttgacgagagaaaaccagagagtgctttcttttgattatgttcacttgatgaagcaaggttgccggaagtctgcccttttcttgcagaaattcacaggattacacaatacttctgtcccactttcaagcatccctgtgaaataagtaggttttgaaaagcaggtgcttggctttcaacctaagccaaaaggtctggatgactcctggaagaagacagagtatcactttggacaaaatgcaaatccatttagcaaccaagacaggaggaacttttttctaagtggaaatgcaccctggttgaggaggccagggcagaagagtgctgtctagagcactcagcagccaggcactgagctgcgcccgtggctgggggcttacacatgtatgttgctagaacattctctcatccctccaccagcgcccctacacacacattacggaagcagctctcagggcactctccctaaagaagactgaatttgctccgtagatattgattaagtatctggacttaagaccagagaagaaggtaaaatgaagctgaagtccaccatctttctatcttcagttcctctgtgtagggagagaaccattgtttcatgcttctcacatgtgcagtcttctggtaaagtgaatcatagaaacataatttgaccattcagagaacctttggactgagagatggaagcgggctacagggagaaaagatagttaaactaactatccggtgtagacaccagggctgagcccacccctagattgttgccccaaatctctcagctaatcccactcttatcttcatgctaattttcatttctatttttttcataattttcatgagtcacacatttattctagttaaagtccctcttttaaaatataaatcgctttaaaaggtaaatacaaatattttacaaataaaactattaaggtgcagccatttctattcagtcattcttgtgttcatcaaatatgaaatttgaactccctatggacacatttgagggttcacacttgaatccagagagagaagttcaatggcaatagcaataacaaaaataaaaggtgacattcattgagctcttaacgttgtgccaaagtaatttgctttcatcatcttatttaatctgcacaacaacccttcaaggtggggttcagttaatgctgccattcactgtcaagaaatagattaacaggcttagaacccataccagttcagcttccagtaaaatgtagtttcttctgaaatacctcgttttgagggactgagtttaccttgaagcccttcctccagctgctgccacatctcaccatgtcttggcagctatgtcatagaagctgccagtccacaaggccctactgtggccagtcagcactgaaatctctcctcttttccacttatctctacagcatggcaggaaggccttgggctgagaatactggttagcgagggagaagcgcaggctctgccagggagaactacggggtgggattcaggctcctttctgggtatgtggtctctaggaagagcaattgcatcagagagaactgaaggagaggtggccttggaggagagggctggagagcccagctcccacccaggcaggtgaccttgcacagggtcgtctgctctcatcatgtgtcctgacgatttgatgagcctgctcttgtttggaaactgtagaagtgtgaggcctgttgctgaaagtaactttctcttccctccacaggcatgaatgctttacagttgcagaacctggcgacgctggctgctgctgcagctgcggcccagacctcagccaccagcaccaatgcaaaccctctctctaccacgagcagcgccctgggagccctcacgagtcccggtgagtgtggggggtgctcttcccttgcaggtgatgcagcaggagtggcaggtaggtttccgtgcctccaggtgcgagggtgaggctagacgtgtccaggatggagccgggatactatactgggctgctttatgtcattgggttattttatttttaaaaatggtcaaagttcgaatttgtcttttattttccatggataatatgcaaaaaagttttcagtgagaatccactgtgcaagccgttctcacacattcactctgttttaaacactagtccattcaacactagttaagttgttaccactgtgaagagcctccgtctcttagtctttctttgtcctgcccttttccaaaaaataagacaatgtaagaattctgtttcaaaattcctagtcattcccatgtcacatttcacagcaactccatccatcacatttgattttaaaatccacggtccagtaaggaacatgtttgctcatttctggtcaggctctggggtgtgtcatttaaagtctttttttcttcacaaattttgttgccttgttgttcaaaagcagatgccagttgtcttttcatacaagccagatagaatgtggttgcttagataccgtgatttgaggttttgttttgtttttttttaatttaaaaaagtcgaacgtttcactggctttccatctctgagttttccagacctcaatagatggtctcacctccttttctgttacatgaaggagatggcctggacagtttccaagcttccttctaactttcaaaatcccatgaccccctatcagctgcgccccaaggattagctaagtgttggaaaaacgttaatgaaaaaatagcttcaggaaacacacatcgaaaactacagcccactccacgctggctgttttagggcttttgacttgagggaggaatgaggcaggttcctagagctggcagttctcaaaagagcagttgccctttgtctctgcataaaacattgtgtatctaagacatttcacctgggggattgtttcgagggagaagtctgagagatgtttaggagaagctggtggatttccctgtaatgtgctgagatcgcatggcaggtgtattgacttcactgtgtacagtgtcttcaaaaacataccgttactgtatgagggccttatctaatataataaacactattcctgaaaaatcaactttgtcacccttaatttcaggaagttaagtgatagcttcagtgcaacacatcaacttacttaagtaaatcctgtaacgatcccttttgagaaataaacatttttaacatgatagatttccccttcataaaaataagtcatttttttaaaaacatgaaaattagaccctcccaacttagatttcacaaatcagattaaaatgtattttcttaagagggattttttttctcccctgtgagcactttgattaccccaaaatagcactgagtattgtgaatgcattttggagcatcttcagtccaaaggaggcttgacagtttaagaagccaaatgcagaagcagctgtcggctgattggtgtagctaagataactcaaaaatcatatcccaaaagcgctttgtggtgtgagcaggacagatgtgctgcctaccttcgggagtccttcagtccttcagggacttggacaagaagcaaagcaatgagtgtcagatctgtgacagaatcccactgaacaaggggaaaggggactggaggaggtgacccctctctcaaaaggtgacctttgagcagagacctgagttccgtgacggaagccatggcgcgtgttgaggcagaggacagagccagtgggtgggggagagcggagtgggggctctgtggtggaccgcgtccgttccagcccacgttgggaggagtgtgagcttgttgcaaccttcttaaaatgtgggctactggagatcatgccactgcactccagcctgggcgacgagcgagactccgtctaaaaaaaaaaaaaaaatgtgggccactcagacggtctagggcgacggcctaggtgttagtcggaaaggaattttaaatgtatgtgactattttcaatttcttcctgagactgcagtggaggaaaatgtgttgtgggatgagccttcctccctgctggagtcaaaaccacaccagcgcagcgtccttgccttgactgctctgtaagaggcttcttgcccttcagaacacgccgctcgcttaggtgtcactgagagcgatttttctcttctctactgaggaatgctttgcataataactgaaagtattttattagaatcctaaagtgtagcagcagcagtgattgaaatctacatttcaattatttttcttaagtgtaactaaaaaatctgatgtttaagtgaaagtaaattatttgtctaatttccatcagggactttttgaaagtcacagaaaatgtggttagtagaattcatgaatctccacttcatcaaggcagtttcctagaagataaaaggggttgaaagccattcccaaggccattgccattatttactttttaaataataataaactgggcatactatttggaccatgagccagttcacttgccctgtgagttgaagggaagcctcatcccatctctcctccacaggcctggggtttaccctgtttttaagcgtgtctcttaagcttcagacaaattcatctggaaagcaaagggacaattcaatcccccaaactgttaatttttttaataattgtaaatttatcatttcaattttgcatacccaggaaaagtctccctacagcattattataaatgattttaaacagtcttggctttaaaacatgaaagattaagtcttaatttttgttaaaaaaaaatcccctcaggcaataaataggttcctttgtctcatggccttgaaataaaaattaaaatagtttaaattgcccatggttaaaataagtgtttcgtgcaattatcagatggtagtgaataaaattagaaattaaatcatgaaagaataaaatccaggtaagtgcatattatgccttttatgagtttctcacgggtcttttgaagcctaatttaatcatgtttcttgtcttttattttgatatgatcattttacctgtgtttaccccagtctcctatttagttaattaattcttgggtcatttattgttacccagtttttaacctgtttttgacgactgtgtctctgtttatgcaagaggcaaattgtctagaaggggtgtagctaggtattaaagaagataatgtttgtcttccattcagcttgcaaatgagttagttttgtctggtaattttgagcgcttgaagagactgttactgttaccacacatgaatattttttggtattttttggtctaaaatgtattgcattcacgtaccatgttattccactgaacttcttctgtcttcttctttaaagaaaaggatgctttaaaattctccaaatgcttctgtaagtgcagacttgaccaagtacacatccaggatcatagactggttcttcccatggtacaaggcattctaaaatgctaggaagcattttttcattcccaccattgacccttcaaagagttatcactttgaattctgggtggtattttccccatcttcaaggtatccccagcttccttgaaggctgtgacaaacaccaagcttcaaggaaatggtgacacttcctctttgactatctgagggtaacagagattggagtgtttggacgttgttcaggcattccctgctcgcctcacatagtcatgaccgatagacggtgactgttgttcttgcacacctgtgtcaccaaagcagctgaatgagcagtgggaaatgagaattcacccttgaagttatcctgtggcctttccattgacagggggctttgtcgccaccttcaatagatgtctgcatttgcatcagaggagaacttgcattaggcaaagaggtgtgatgcataagctggtttaacccacatttctgagccttctagttcatgcagggcaaatacataaaaatgagttggggcctgcactgccccctccaagtggtgacatgcacgaggcagtatcaccagatgggaaagagtggggcaggagagagggacagacaggtggacaaagaggctgtctccccaagactactgcagtggtcccacagcctcagagtcgagaattaaacttgccccacagacctgcccttcccgctgcctgccccaccctgctaaatggattgtcccaatggctggtgtgacttggtcgctgatctttgcagctggcccctggctcagctgcgtgcctcatcagcccctcagttctccctgtgaagcatcatttccctcccaggcaacaggagcctggaagagacccttgtcttctctctccttgtactactggaacagcctccaacttggccccttccctctgtctgtcttacacactgttggcaactgcggtctagactggagtgaaacaaactcctgagtgtggcattcagggtccacctggaccacctccgcccttccatccagaatccagccagcacacactcgcccagatcaggccaccccccgtagcccagccacgccgtcggcctttacgccattattcttgcaagcttctctacctagaacatctcccccatttcctcccacaaaaatctaatacatcactaatacttgttgcagtgctcattcttgagaatagtgtgggtgggtataaaagcgtttctaatgcacattataaaaagtatagtttatgctgcttctgtaatttacactataagaagatttttggcggtaattagtaaaaactgttttcagtaacctactacttatatgaatcaatgcaaatgccacctctaccatgaagccttctagttaggattgatcacttccacatcgtattgctgagtaagttcctagctcattctagacctggggcagtgcagaggttcctgaggagctgtcgggctgcttgaggccaggggcagagagggctggagtgtcagtgctggccaggcgttctgcagacgtcacccctctcctgtgctcccagggcacactcggcctcccttcactaacactgaccctgttgtctgcaggacggtgatgtgggcactcactttgtgtcttgccctctagccagtgagttattttaaagtagggaaggtgtgttatttactcataattcccccttgcatctggagcagcacatcagacacaggccctcaagtgttgtttgttttttttttaattcagtggaatagcgaagcaaaaattgtcaaagacaaatgtttaagggccatctgttcagtctagtttagcgcacacgtctctaaggaggcagctaaatccctcacagtgacgttggcagggtcagcgtacccacccagttcacctgtaaggcgtgcctctgcctggatccctcaagaaccaaacctgcaatttggtttcaccttacaggtgaatactcaggtccaacaggtttctgaagaataaatcagtactaacttacaccaaaacaatcatatgaagcagtctttttattacaggggcagcttattttacaaatagtggctttcaaaatgttctgatgtcacgatatagaataagtacgagtctggtatcagagaagggcatttcaccttcagaagaaccacctactctaatgtgtgcttttgaaacataacatcatggcagatcatccccagaaagtgcccattagctctgtgtgcactgctaagtccacgtagtcttccggtgcctgcccacactgcttacataagcaaggtcccatttagctttttagagtattttttacttataccacacttataaaatacagggcattttataagtgcaggggaccagttattcctgggaagatgggcttagcctttaccgtcctctttttcttcttacacccatcttttgtcattgtttattcttaagagaaagaaggaaatctcaaggtagaccattcttccctccactagcggctaagtgtctcagtcaggcagagtcaagccagttggtaaaatgggctgttcatgtgtgggtttcaatctgtcacacggccaggcgcagtggctcacgcctgtaatcccaacactttgggaggccgaggcgggtggatcacgaggtcaggagttcaagaccagcctgggcaagatggtgaaacccagtctcgactaaaactacagaaattagccaggcgcagtggcaggtgccagtaatcccagctactcgggaggctgaggcaggagaatcacttgaatccaggcggcagaggctgcagtgaccaagatcacaccactgcactccagcctgggcaacagagtgaggctctttctcaacaacaacaacaacaaatctgtcaaacgtcttttcattttttattttagctttcctatggtgctgacagtcaaacttgtttacactcattgctgcagtagaaagagcactgacctcccggtctttgctcatttcctgcaagtttcaacattttacactgcttttctgaaaattgtcttctttgctcgtgacattatggggctcactttattttcattaatgttaatggagtcacacattacataacatgttctgtaaataaaatgactctgtagtgactgtcacctcttgatagattttttttttcattcattcaacaaatatgtatcaagcatctgtgtgcctggaactgttccagcactggagacacatcagtagacaaagctgatgaagattcctacctgcatgtcctttctcttctagcatcagcttttaagaaaagcgtcattttactgaattcacaccatggtaaaaacaatttgaatagcctttaagtataaattgtaacttctacactcttaaaacgtcataaccaatattttgtatatcttacgttaaattttgtgaatgagaccaagagtgggagagggaagctctcttctctcctttcttcctctcctttgagctgtaccatctttctgtgtgtttggtgcagcagagagctgggagtagggccccccttaaggtagaactgcaagtggccaaaccagaaagcgagagggtttagcccttggccctgctgctcgggctgctctgtggcttctccacagaagcatgacacacaaaccaggtggtttgaaagttcttcggcatgtaagactgatactgttggggagaacagtagttggaaacagtgagtctgcctagtaaatgtcctttatttggcattgatcatcctgcttctaaaggaggagagagcatgcaaacccctcccacccagaggggttttgagggccccttgtgtggagggagtttgggtgtgcaatgaacttctgcctagtgagtggatggatactccaggcagttggtgcaatgccccaacctggagcaggctggagtctcttaatagtctgtaaccaatttaaagcttaataaagctgcgcagctttgggggtagagatatttacggttcaccacagagcccacgctgggatttatgcaagtagattccacctgtgccctgagctctccttggcgggtgccttcatccccgggatggacagatcctcgcgtgcatcttagggctgccactcaccaagcgcattgttccttgttttgagtgggctttttaacatgtgcagacattgactctaattcttcacgtatttgctttttgctgttggtggcgctggactctgtgctaagtgtgatttgtttttaaatattgctttgcagactcttctgtattgtggcaaatccacatcagatccccttgtgatgtttatatgagctcaggctgtgttttctgtccagccacttaatgagattttttattctcactaaatcacagaaatttttatttctgtgatcttgtatgatacaaacatgttatcaccactagcactggtgaaaagcatgtgttgcttaattgtgttatattaggtgggaaaatcagcaaagctttattctagtcacaacttcccagaagcgtatactgtaagttccatttcttcagacttgaaagcaataaaatggaaatttttagttcagatgtggtttaatcccgagaacccgtcaccatcaactagatgcattggccacctacaaacacaagcaaaatgtaccgacctgtacagcacagacagcaggaaggcaggtaaggtacaggggtcagtgacaggagagattctgccccaaggaagtaagggaaattttagtagaagagttgacatttgagccaaaatgttcagggtgggtaggatgtttaaaagtagaagcagaatggaagatacatcaaatgtgggaaaatgcagaaatagcatttaatcagcaaatggaagttcatctcacttttcacaagcatggacatatggaaaaggatgcccaccggggaccctgagagccggggctcaggagctgggacttttcctgtcagcagtgaagagctattcaggactttaggcccaagaatgatagacttcctgtgtgactggactgaggcacccatttgatgtgagggagaacaaaaggaaaggaggaaaaatgatatggtgtgttgggcctgggtggccagtggagcattgctctcagttgtgaggggagttgaggaggaagctgtcatataaaatgatcggacgtggcacatggagagctcaagtgcacatgaacggacattccgtgaaatgtgtccagcagcagttggatgtgtgaccatcaggctgaccagagccgggagctgcagagtggattgagactgacctgcagaggccaggcgggctgccctaagcccggggaggggtgaggtcatcaggccaaaatcaccagcaaggcaaggcggggaccaggtgcagaaagccttggggtctgtgcttgtggaacagagggaccaggggatggaaagggagctttctgggtagcacagtgtcaggggagccaagcaggatggggctggaggaggaaaaggcagaaagagctgactgaagtttgagttggggagtgggttctccccagactggctgcttcactgcagtggttgacagttttgcaggcagtgagagaggacacaattctatatgacatgttcatgaaatgtgaatatttttaaaaatctgtaatggggccagtcatggcagttcacacctgtaatcccagcactttgggaggctgaggcaggagttccttgaggaactccctgaggccaggagtttgagaccagcctggccaacatggtgaaaccctgtctatactaaaaatacaaaaattagccgggtatggtggtgcacacctgtggttcccagctactcgggaggctgaggcaggaaaatgacttgaacccaggaggcagaggttgcagtgagccgagatcacgtcactgcactccagcccaggtgacaagagcaaggctctatcttaaaaaacaaaagaacatgaaaaatctgtaaaagtactggggtcactaggggaagaagtttttatgtttttgttttaagatggagaaacaaaacatatttgtagaccaaagagaagagccagaacaaagggaaacaggaataggccaatgagagctgaaagctggactagagttggagggctggctggagggatgagctcagcctccagcgtgtccctctcctgtggcgagggggatgctgccttctgagggtcgggtcacatgtcatctccccctgggaggagcccccacagcagcaccctggccttgtggtgccatctcgacctggtactagcacacaagccaacaggcacaaatctgaatcagggctgagtcagcaggtggtgcagcctgagggagggaacactgacctctgtcaggattggggaggatgccaagaatttaggacagaagggtacttatatcacatatgggccaagaattgatatatctggggctagaaacaaaaactcatgccggggcagaggtttaagaaaaagtcaacctacagaatgtaacagaggatttctaattatatttgtctttctagagtatgtagacatcttgatcaagagtcattggagcaagtaatgtaatcttaattattttctcagttgtgaaatagaattaattgctaatactcacttttcttgtggaaacattgaggtttatatatacacacatatttatatttatgtaaatgtatactggtgcttttttaaaaaaacgatgtttaagtatcatatatgggaaagatcgaatcattattttggagtgatacgaaataccacagctctggagaacagaagactaggttaaaactagaatgagggctgatgatgtttaggttaaaactagaataaggtccgatgatgtttaactgggttaaaactagaataaggtccaatgatatttttctctgaatctcttgcctttggaaaacaagtatctccccacctttcctttaaaaattaggatgtaaatacagggagaagacagtttcctcactcctttctgcttttgtgttctgctgttcaagggaacggggaactttctacctaccacaaatgccacttgagctcctagaaccaacatcccctccttaccaaatacaaaatggtaagactgggttaaacagagcaagactgctgtgtccaggcaggatttctgcactaagggtcaggcctgaggcccctggggagttgttggtttgtatctcgggccacacggcgggcggtgcgtgctctgcaccgggcccttgcaggggcagcagtcctactgagtccacgcggcgccccagcgagcctgcagccctgctgtgacgtccctgggctgcgccaggtgacctcttgccccctgctaccattggggtcatgttgcccagaggaaaatctgcctcccagaaatgatgttctctccatctggacaagctgccccccaaccccccccaggaaggccagacttcagacaggctgtcagtgacatggtgacatgggcctgctttcctgagaagcccctgtccttgccctttctcttcagaggcccgagcccggtcccatcattaaatgctacagctgctgttatgtatccaactgcctcttttgtgatccacgtgaggaaaacagaggcctgcaagggtcagtggtttgcccgggatgttagtgacaggtgaaatgacagcgccaccgcaccacgagacagtccatattctaagcaggaactcctgggatcccagaaccgtatttctgggtttcgccaattacacattgtcccccttgtaaggagatcatcaacatttttttttttcggtccttctccgggccatctgtaaaaacaaacatctggggccagctaaaggggaagtatatacttttgtttcagtaaatcataagcaaaatatcattggcagggaaaagaggtttgatttttccctctcatttgccccgctcgtaggagatccctgtgtactgcctgtatgaatggactcttccaaactcatggccccacactgcctttatgagtgcccgtcttcacgggactggggaagatgctaaaaattaggccgggtagggaggcaccctggtttattgacaacccatgaagtagatttcttagatccactagacagagcttccacaagcctttgggaatgaacattaaaggagtggaaacaggacagctgctttggacgtgaggagcaggtgctggcccctcacttccccgccttccacatgtgtgccaccgtacaataaagcctcagcagtcgttctgagtccagacccggccctctagactgaattttcctcttcccagtcttcctgagaaccagtagtgatgactcttgcccagcactgcaccaagccaggtggcatcagcttccttgggaagcagaactggcagcagaagagaggggcaccaatgtctctggggaaggtaccctcttccaggctgggagtgtgaggtcacacctcaccactgcagcgcccagtgtcactttccaaccctacctcctcttcctcagtcaccccgcccctccctgcccaaactatcttcgagggactaaattaaaatgaaaggtgtggttattgtggaataattaggcctcacggggggagaggtgtagtatattaatgccccagggttgtgattggctagtaatgctagtgcctgtgtcatggcttaattatcctacttcctcacaatcttttcctgcgcagttggaattccgcatccaagctcgtttgaggcaaaacggcgaccgcgggctccagtgtcctgagtatgtttggtcaatgcaggcgattttctccgtgtttacaatgattttatttcctaaaccacaaagccactgtgttttcactatctaattgttctgtggaaagtgtttaacgagggcaccgaaggcaaattcttgctgtcttctgttaatgttgttttgttgcagctttaaaaaaaagtattttgctatccaggaagagtggggagtagggttaatatgagaacattaatgcatttgttcctagaaagcaagccagtttctgggacagacttaacgctagacatgccctgcagatacactgagaccaagacaagggcgaaggggaaaattcatatgggaattatattttaaataaagaactggcaaatgtgagagatggataagcccctcattgctgtttttctccctttcgtcgtggatctggaatctttagaaggatggaggaatacccaagttcctccgcaggcagcctcaccccaaatcaagagtcttgttcaccatcccaccttctacacagaataagaagcccactggagcccctatgcgggccctgctcccgctccccaccccgcttcccccccacttgcgacctgcgactccgccccagaggcacgggctgcgcagacaggcaggcgcacacgagcagannnnnnnnnnnnnnnnnnnnnnnnnnnnnnnnnnnnnnnnnnnnnnnnnnnnnnnnnnnnnnnnnnnnnnnnnnnnnnnnnnnnnnnnnnnnnnnnnnnnnnnnnnnnnnnnnnnnnnnnnnnnnnnnnnnnnnnnnnnnnnnnnnnnnnnnnnnnnnnnnnnnnnnnnnnnnnnnnnnnnnnnnnnnnnnnnnnnnnnnnnnnnnnnnnnnnnnnnnnnngacgggcttggactgggcctcagctcccacctgtgcagagtggcggcctgggagctgagcgtggccctcggcagccctgcttctgagctgcatcagaggaacggaggggttctctggccctggcccggtggcaccacggcagcaactggctttacccactctgtttctgaagctcttcctattttctctggcacataagcagaagggaatggtttgatgagggtcctgggtggggccacaggctcagccatgtcgtgaggagccccagttaggccgcgggaggtggagtgcgaggcccttgtccagcgcactagggcctgcatgtgggcctcatgtggagagagccagacagggtgcccaggtcagccgcctccgccttcgctggaaccgcctgcccctcctccgctcagcagatgccagctcagtgcccgctgcaccagtgattctcatagtttctagggaaacggacaagcaaatccctgctcttcaaccggctgtcttctggtggggtttcttttcctctggaagaacagaaccgtaacttaccactctcacctagtttttgactctgggttccttggtgcccagtgactgttgccctttcctgtcacaaaccaaaccttcccactccctgcagcctctcaccttctcatgcctcagaatcaagttttcacccagtcgtgatggaatttgacagcaccgcatcggatagtcctgacacacgtggttctctaatgtttgcatgcaaaagcagcgccgagggctggttcaactcagatgcccaagccccacaaccagagcgtctgactcagcgggagtgaggggagccccaggtggtgccgatgcgggcgaggctgtaactttacagtaacgatcttctccattaaatgtgtctgtggctacagtgcccccaaaggacaggattgggcccgcctcccccagacaagaactctgaccaaatggcctgcagagcatccgcagcccagggccctgggccaaagggacttgacaccacacaactgtggtctttttcttggtgactttctctgtgatctggtcatttaggatcgagttgggtgtacttggtgtggcagctgctgtgtataggtttccccgggagagaaagtaaaagctgtttccattttaagcttaatggggcttgtatttatgtcgatcctttgttctcgggtctctaaattgacatgagattttcacattgttccgctgtgctgcggacagtggaagttggagccttcaccagagttctgcctggaagcattagaatcctgccttcccggagtcctctctttctctgccaggagatgaagccagcgtgtgtttggcacaacaataagagcttttcaatagttggctttttggaccttgtggccatcaagcctagcctcagggtctacagaaacccccttgatacatgtcggaggcatctgctttctcaccccacaaacagggactcgagtgcctcagaggtggcccagcggaaacttcttccctagccggctctcctctgtatcgaactaaaatctgcctctgaacagcttccacccactgatcctaattttgatctcttgagctgcaaagaatatctttctcacgtcaagacctaagactgtttcttgccttagtcccttgcctctctaggctcaattttactcttatcagctcactctctttcaactcaactttcatgtctggtcacccttctcgggacgctctcaaaactatacacacagactgaccttcccaatgactggactaatgagaaaggctgcaaaatcagtcatccatccagtcgccactctggggaagaagatgttgaatcttcattgcaagtgctgtaaaatgaagtgtaaagatgcagttcctcttttgaggacagaatacccagattctcctccttcagatacagactgaacacacgtttattgatcacccgctgtgcatcagacatcagtgccgccttcttggattgccacgcccatccgcagaggcagtgtgtgttactcccgtttcgtgaataaacactaagcctcagctgaatggagcagatggcctaaggtcttacagactggaaggaacagagccaaaaaattaaaggcaaatctgagtgagtgcaagtttactgcttccataagtaagtctctgcagtagccactagatagacataagaggggaaatagaatcttgacttccacatcaacataatgctgactttgcagccagacccctgggtttaaattctggctctgccactgagagttgtgtgaccttccgcacgcgacttcacttcacaggataactgtaaaggacttaataggctaaggcatgtgacgtgcttttggcaatgagcagcacgtggcaagcactcacaccttagctgtgctcactgttagctttattcccagtacggtggagctgcagaatgttagtttcctgttgctgagatgacaagttaccaccaacctcatggcttaaaacaacacatttattatgttgcagttctgtagatgaggaacccagcagactcactgggctagggtcaaggtgtcagcagggtgtgttccttctggaggctctcggggtaaatccatttcctttcccggcttctgcaggccaccagctttacttggctcatggccccttcctccatcttcagagccagcaagtcctcatgctgccatctctgattttttctcttttgattccttcttccatttacaaaaacccacccagaccatccacaataacctcccccatctcaagttctgctgatcagcaactttcctagtccattttctgtggcttataacagagtacctgaaagtaatttattttaaagaggaattatttcttacagctctggagactgagaagtccaaggtcaaggcagtgcatctggtgagggccttcttgctggtggggactctgcagtcctgaggcagtgcggggcatcacatggccggggctgagtgtgctaacatgcttgctcaggacgctcttcctctacgtataaagccctacttccactcctgttacataacccatgaattccttaacccactaattcatgaacggattaatccattaatgagggcagagccttcatgatccaatcacctcttaaaggccctgccacattggggataaagtttccaacatatggaatttggggaacacacattgaaaccatagcacattccatctacaattttctctttgccatgtaacctaacatatttacaggttccaggacttaggacatggatgtctcgggttggctggggggtgaacagagaacataatagtaatttttagttccctctccaaacatagcccttaggccccaaataagcttcatttacctatccaggaatggcgctgtttgaacagagagagaagagagaacgggaatgcctttgtcaaacacgcatcggcatcttctggttcaactcggtgccccctcctccagccctggcccagtggatacaggtccttcccagttctaccagtctgatagtcacccctcctcccacaggaaatccaaggctggtgaggggctagggggaggtggtccaggttatccacatagcagagaaaagaacttttttctggaaagtggagctcaggtccttgcctctctggaaatttatttgagttggtttgagagagcttccaaacagcccttcctccacaactgctgtatccctaagtggcaaaggccattggcctccttgtggagtcctcatgcccacacctgggtgccggcgcccatcctgcatccctcacgggtacaccggggccagtcccttcaacactctgggcctctgcttcctcatctttcaagcgcaggaaagactccagtctagttcacagtttgcctgggaggatcccacctgcagtaaaatatccgtctgaaagatgtcctattacctgttattgtcagtgggattaggaagagaaggaaggttggggggttcagctctcagctctgttggagatattatacgggagttattccaggtgatgatctagcacctaatgacctaggcactcggtctctgacctacagtgttaacctaagacaagaatctcttctgggtgtagtgttcatcccagacctagcacagctctaaggagaaggaacccatcccgtcccctcagttgggattagtgtttgggattactcaatttgtagttttccaacagtgagcttatctgggcaaacaagcaaagaacttctgtggccaggccaaggtgggcatatcctcaccatcagggtctctggaccacctcgcttttcctgttctccacaccccaccctgccccacaaacagttttcacaaaaggccacagactttgtctgcacatgagctgataaaaccatggccatccttgcctgctcaaccattctctttcctggcacgccagctggcctgaacgtccgtcgcctgattgataggttttaaccagtggtacaacaggcttaaaatgtgacgtatccaagttattgcagccactgtgcgagcaaggtgaggtgcactttgcagcctccgtctgggatcctcttggctttgttctgcctcctcctgcttggatggtgcagcctctgcttgaagaggtgttctgggagattatgaaccaacatttatagaccgcacctctcctgagatgctcctttggcattttgtaaaacttttaagtgagaaagcgtagggtacagttctcagcacagactgaaggaatctgaggtgggaagaatgcagatggttgtccgaggcagcatcttgccagcctgccagcacagaaatggagagtctgggtgttggtggcaccgcatgtgtctctgtctaagacctctttctcaattgtgcatctgctgaacggtcagtctttaggtacttgatcaaggttggctgtgtgacaaattggagtttttcttatgctttaaattatttgttaacattcagaaggttcttaaaggtggctaaatgtacaataaaactaccctcttacaactgagatgccagttggggtgaattttcaaagtattgtctgatgatgtagagtgcacagggagtctttccactttaaggcaagtcatctagttaacttttcttagtctcatgcttgattcttctccctccttttcttcaccgtctccccaactttctactgggaccgtctaagaacagcgtagtaagaagtgagaaattatgtccagttcactatagccagcctcccagtttttaaataggaagccagggtgtaaagagacctaatttgcatattgattcattgtcatcaataacaaaaggggcccagggagtttctaggccgcctccacctctcctatggccccctgagctaggctgccccatgctcataggctatgcgcgtatctgtgcctaaggagttctctgtccaactcactgtttgccatcaccattgggagtcagccacatgagagcagtgtgtggcatcaacacacctgtttgcagacccaccttggagacttggaggatttgagaagtcttccctaagcacaagatcagccaggcctggtgtcctccagcgcctcttctcccttgccccagggcgaagcactctctagaagcgcgctctgacgggcactactctggaggcacctggatgggggcgcagcaggcagcatctctgggccagcagttcacagtgtggacatcataggaagagaaaggttacagcctggcatacagggccctcctgtgatttcctgcaaggtgggagaaggtcctccagcagaagccagatcagtggctgtgcagtcatcaacagttggagatgtttagatgaaagtggggaaaagtgttacctgctttcattgtttcataaaatagatcctatatcattttgtctgttctgttcagcctctacctaataactgatgatgatctaaaaatggtgccaaatacagtgccaaattcattacatagattatttaatctttacaataacccggtgaattcagtgcccttcttcttcctccgtttaaatacaatgaaacagaaggttggggagatgagggaacaaggcaggcttaatgaaaccccattttgcctccagttgttttgtgttttgtttttaagattccactgaaaagagctgatgaaactatagagttgtgttctttattaagagctatagtttcatttttcagtagcaatggggctgggccaggaccctttttcctgcctttctcagtgatgccccatgccagccaacctccatgatccttcccctgctcaccacagaggcaggcaggtgaccatccccacttacagtgcaaaaaggtggggagactggtgaggtctgtgctgtaagatgacgttctgcacagtgcaagctgcagagactaagagcaacagcctgtcttgtgttttgtgtcttgtgttttgctagatataagattctgagttaataggttttttctttttagcactttgaatatgtcatcttactaacttctcatccattgtttctgctgagaagtcagctgttaatcttactgggatccatgatgaatcatttttctcttgctccattcaagattttctcttaaactttcaacatatttctgtcatgtgccagggtatagatttctttccatttatcctacttggagtttgtttattttcttgcatgtgtggattattgtctttcatcagatttgggaaattatcagccattatctcttgaaattttttttctggtctttagtgcatgcattacacactttacatgtgtgtgagtgtgcttaatggtgtaccatatttctgtgaggctctgttcatttctccattcttttttctttccatcctttagattgtaaaatctctatcagtatatcttcaagttcactcattcttctgccaactcaaaccaactgtggagccctatggtgaatttttcattttggtttttacttttcagccccagaatttccatttttttaaatcaggacacaagtaaattacatatagcctattaaaacttgtcagttcaattcaggtcacatttatttattaattaaagttgtgtaggtattttgcagattatttcactggacttaccctcatttaaaattgtttttgtatggtgaactgtctaggctaatttttatttccatcactttcctactgaaagttaaattttaaaatgctgccgtttgccatttgcctggtagatgtctatcacatgctaggcagtatgattttcttagaattgcaagtgtcctctgtcctacttacttgcatgtactgtgttgatttatgaatgttgaaagaaatagatttactttgtaaaatgcaaaaaagaatttccaattttttctttttataatttcagcctttttattggcattctttatttgatgaaacattgtaattacacttataatcctttaggcatgattttttagattgttatcatatttataatagctgctttcatgtctttgtccaccaagtctaacatctgggccctcttacgcacagtttctgttgtctgctgtctgctttttcctgtgtacggattgcatgttcttgttcccttgcatatatcatagctttctattaacaacaggacattgtagatgttacagcacttctgggtgctaatcctccttacccactgcacatcaccccttccccactggcttctcatttgtgtttatttccttactgatttagcaagaataattcagtgaagtctattcccctgcactgtgcctctgctgtcactcctcagaggccacagccttgagctatgagtgacattcctatttttcctttgttaaattacaaaattcttccagacagctccctttcactgcctctttgcctgatctctgttaagtttctggctgctgtatctctgttgttttcacttccagctgttagcctccactaatcttcagttgtttgcgctattatttttggcccaggagcataaattgtccccacagtctgctctgattgtccccacagtctgctctgactgtggctgggccctttcgtaggggtgctctttcggccagtccttgaggcctgctctgatcccaggaggactctttctggctgtccctttccctgccctctctgctaagctttcagctggtctactttgccatcatggagctactgcctactcttaattgctcaccaacaaaatttatcttgtttctgacagtgcctgaggtttgaactttcctatactctgttccaaataattagttatccttaggggaagttacagagccctttgttcttgtgacctgtctctccctgctctggaggtggtgcaggggcagtggcctgcttttctgtgaatgacacctctggtctacaggaagggtactgtgtgagcataggagcaactggtcttctctccttgcctctcccagcataagacctccacccagtgagtgagatggagtgaatgggacccagtactcagaatgctatgcctagcgtagagcttcccctccatgagtaaaggctggactgaggtagggacccctctgcttcttggtctagaatagagcttctgccacagagttggcaggggtgggagctgtgaattgtcaatgttggtagtctccccctccctgggagaaaccataaccctgtgtatttggagctgtgggaagaggtagccccatcttcttggccatacctgcccagggtagagcttcctttatgctgagcttcagaggaggggatttgtaccagggaagggagcaggttgtgggttgtgggtcacatgccacagattcttgctgctcttactgagatttgataaatcttcttgagaaaaatatttcttcatctatacacttaggacaatttccagagactttaagtggttggtttttattatttttatctgttgtagttgtttcactggaaggagggcccaaggatatccttattttagaagtacttccctggtgtaccctaaaattgtgtgaaaatgttcaggccttttttgctggtttagaattcaaacatgtgcgagggatagtttttaacacgctacttactagcgcagcaatctggcaaggactattacatgtagactggcatcggatgcagtccctagaaaataccccaaataggagagacttctatttctggcagttaggcagactagattactggaaagaccctcccaccgggaaaaaccctaaaatgtatagtaagattttttaaaatatttttaatgacatcaataactactcaattagcaaagaatactcataaatcaatgattaagtgaaagaggaaactcagagaaggggtagcatattgaaggtggctttccccttaaggatatttggtgaaccgaataaattctaataactgttcgcacagctttcccaaccataaggaatacaaggaagtccaaggctcctgtgcagtatctaataggagaccctccccatacgagcctgaaacctcaaaaggctaaactctcagtgtaaagatgaacaaaaaatactccccactagaaaactacaaggaaaactgactatctcaaaacatagtgctgggtagggccaggggaatttccctctgagaattcataacaataaaccatccctcacgtgagtttacaacccagtttgattgtatctgagtggccaaaaatcctaagccatgaagttaaagtatccccagcttgtagtttcctccagcaccttgtagaatcaaatgtaagtcatcttgaaagaacccatcttcaacccaggcctcaaattattcctagaaataaagttccaagatatttaagctcacaaccaaaaaaaaccccacaaaatatacaagtaaaccaagcaccaagagtgagaaatagcagggacattattagacaccaccattattagacctcagatattagcattattagcatacaacagaaaggaaatacagctaatatgtttacatattaaaagaatttgaaaagcgaaaaagccactgattatgaaaaatgaccaatcatgttgataacattctagaaatgaaaaaatataatcaaattgtaaaatttggagatgtaagtttagcggaacattacatacaattgaaagagaatgtggtgagctggaacacagattttggagatgatgcccaaccgagaaacagaatatgagaggtgaagtgacatggaatagatctaacttaggtctagctaaattcctagtggaaaggagaaagagaatgggggaaagtcaatataagagcagctaataaccaagaacttttcagaactgataaaaggtagaaacaaaaatccacatattcagggatccagatgaattccaagcagtgaaaataaaaatcaatctaaacttggaagcaccatagtgataaatgcagaacaccaaagacaaggagaagatctttaaaacagagagaaaaaccactgtccaagaaacacaaacatctcagtacctgacctctcaacagtaataatggaaatcagaaggccataaaatgtgcttggaaaaacctctcagtctcgaatacccaggaaagaaatatttcatgaactaggataaagatgtaattttcatacaaaccaaagctaaaagactttttcaccaatagaccctcacaaaataaagctgtattggatataacttcaaactaaaggataaataacccaggtgaaagaagaatgaataataagcaaaggaagtggtaaatatgtgggcaaatcaaaatacgtggtatgaagaataataatgaagtgctgaataaaaactgaaaaccaagctacaagtaaaatacatgactacatgaatatcccacatctgggttcagagggggctcttctgccttaaagtattctcagatccttgaattgttctggcaaagagcaaagataagtaactttgattttcataagttaaagatgacttaaagtttttatgaccatatatgaaagagtaggaatactatgcatgacttccaaagtagtagagaggggaaatggaattgaaagacaaacctggctggcttggaggctcacacctgtaatcccagcactttgggaggccgaggcgggcggatcacgaggtcaacagattgaggccatcctggccaacatggtgaaaccccgtctctaataaaaatacaaaaattagccagtcatggtggcaggcgcctgtagtgccagttactcaggaggctgaggcaggagaatcacttgaacctgggaggcaggggttgcagtgggccaagatcatgccactgcactccagtctgggcgacagagcgagcctctgtctcaaaggacagcaagaaaggagagaaaaaaatgtaatattagcagaacaaataggacaaaatctaaatacccctagtaaaagacttaaattatcaggctgtgttgtttttaaacctgtctgtgtattagagatgtagccaaaatacaaacagataagtaaaaagatggcaaaagatatccaatgcaaaaacccaaaacagccggctttcttacaccaaacatcatacaaaacagacttcaaggaaaaattagaaacaaaaaggttgccccaaaaaggtttatttcaccagaagataggataatttccaaatctatgcaagtagtaacctcttgcatagaaatataccttcaagatacatttccaaaaataagcatgtttacatggagttggaatgacagacgttcacatgcttcttccagtaactgacagatcaggcaggccaagaaatgtcttacatttaaatgttttccattttagaagtttattgaagatattatgaataactttataccaatatagagttgaaaacaaaatacagcaatttctagaaagcagcaacttagtaaaacggattcaagaacaaaaagaaaagttcagtcatcctatttatcagggaaatgtaatcactatttcagaatcttcccatgaagaaatacaaagtccagaacattttactggcaagtgctaccacacacttaaatgacaattaattttaatctgacacagtctattccagagaacagaaaaataggaacactctcccagtcactgtatgaggttagcaaaaccttggtagcaaaactaaagacagtacaagaaggaaaaataaaggcccatcttactcatgcccataggcttaaaaaaaaaaaaaaagaactaagcaagatattatccaataatgaagccaaagaatgattgtcaacttcattatgtctaaacctggcagggcaggcctcccattcgcagatttccccaccatccagcagtgagtgtgtttgcagtattggtaaaacagtgctgtgaagatttttttaatcaccaaatctgtcaaaattgccacaagtacaatcccacatgtccttcacccaaagccacaagcacagctcctcagctccgtccactgagatgatgacagaaggatttccagtctcggctctcactcacctcgtgtcttctctccccttgtctctgttttcctgtttttcagtggctgcttcaacccccaactccactgctggtgcagccatgaactccttgacctctctcgggactctgcaaggactggctggagccactgttggactgaataatattaatgcactagcaggtaccatcaacagtgagtatttgctgctctggtggacagccttcccccaaattctccacagaaagtggtcagccagaaatgacccgaaaaaggatatgccacggggagaactaaaacttgggatggaggagcacatgctttgataggcaaaagctgtctacactcgttttgcctcagaaaatccccaaccactctccacccccagattctcttcagtgtgtagcacagcgcgtgtgctcatccatggggttctgtggctggcagctcttttcaggtttccaggagtttggtttggtttggtttcggtcggttctgtcctgcgaggcagggtgttacggtgggaaaagttaatggactggaaggctggaagcctgaacccagctctgctgccaggcagctgtgggaagtcaggcagatgctgctccctctctgggcttgggagtctccatttgagaatggaaagttctgggtcagatgattcttaaaggtagcctccagctccaaagtctaaagattcatgacaattaaataggggagaaaattaggccttggaaagaaggaaatgaaactgaggggagaggagccactgctggcagtgacatgatcagaatctttattaagcacccacaggtatgggtcactctacatcagtgaccatccagagggacatcatttagctgtggcaggttgaaataggctggaggcaaatcacttagaaaattgtacttggttccgaaacatatggatggactcaccagagaactgcaggttctgtcctccacagcccacccgctcctgtcattctcggttgatgggggagcagtgtgccggccagaggataagtcgtgttttagattcatgctcggtgtgggttcctgtactgaggaaactgatcctcagcccacagcggggacatgtaatttccctgtccctccgtttcagatcccctggttgcctgagagtagccaagcccagcagatccacgacagctaacagagctgctgatacgggagcccagttagctaccatgcagcccaggcaccccggcacctgcccattctcatttttaataaaggagtccgtgacagttgttgccctattttaagccatggttcaataagtggactgtttttaaagggtgaccaggcagtatacttttttaaagcaaaataatcccagtaatttcatactgtaaaggctcggaataccttgcactggacttggtagaaaatgaacctaaaatttatccaaataaaaattaacttgtataatcctgataaatcattttcagaattaggacatttttcaggttttagtacatctttgtatttagtacatcttttggggaaaagcgaaaacgtggaccgagctttagctgaccatacctcccaaatgggacggctcgtgattagcgtggagcccgtgaagtggtagctgtgccgcggcctcattgttttattccagttagaaccgcctccagctttgacttttccagcagccaagtaggagcctcactgccttgacccccatttccggtacagctcctcgctctgaccttgtccttcacctaggtcgaggacgcgtgtgctcgcacacatcccctcatgctgcttctcttgccccaggacctagttcccctaaaacaaggactttgatttgaccgcctgcctgtccttggtctgcagagtaacaggccagtgggaatggttgtcctcctcagcacgtgctcatgactggtgtgtgtgtgtcctctcgtctgcgtcccgccctgtccacgctgctctgctctgcattgctgagattttcccatcgttctcgtcagggactggagaggggctgtgttgaatggcagagaaaccatgagtagttcttgtgtggggtcttgtgtgatacacattttgcttctggcaaggacaacaggcttaaattgttttgctttttaaaattctttgccaatgggttaatataagtctgtatagttcatagaaaacgaagaaagaatgtttgtcatttcaaataacccctgctagatagtatgaaccaagaaaatatttaattaaacccaaaaccagacaccaatgaaaatacattccttgtgattggaaagtgttactaatgcagagccgttttacaatctccagcattgacctcgagctaatatttgctgcttgtctctaaatatcaacagaaaaccttccaagatagagtatcttctttcagaccattccttctcaacagagatgattatgctaccagttccactggataattcctaaagaaattcgtcaagcagtggttacctggacagagtcagcttctcaaatagttgacggcagcttccatagcactgctatgaatcccaccccactgcagcagccattatctgtttccatatggagagtattcaggttttctgaatagagccaactcttacccaccgacacagcggtcagcaagaaagcaggtagatgactcaccagagccaacattttaccctctttcctgcccaagagcccagcacctctcccaaaaaacgaagtttttggtcagtagacaagtagctcaattaaactgtttgagtttgatatcctttttattccctgatacattaatgagtcaaagggctaaaaaacagtacagcgccctaaaaatgtaagaatcatccagatcagaagaaggaacacatgtgattgaccatcagagtgttcacctctggattttttcagggttccctgagcatgttttatatgttaacatctgaactaagttgaagaacatactttttccacccaagagtctgtatctgattttatgtgtttcagtgtatgtcaagtggcatcttatttttccttgttttaatgcataattcgaatggcttccaaatggcttaccatatagtgcttaaaattatgattgtttaaaaaaaaaaaaacagctgcagatgcctggtgaaaagtgtctatggaaatattttctgtgaagtagagaaaagagaagatgctccaggcatattttcgtggcttggcactacttgcattgtgaaattactgttttaatctgtattcctaatatctatagtttacacagccccacacaacctttgtgcccttaataacacaggcagatatataagtgacacccagtgcacatatagacatcttcatctaccttagttctagatattttatacttagcttctcatttatcagcttgcagcttagaaggataatccgtcatctatacaaaggaaaacttaccccagtgaagtggttacaaatctgtgagaatattaagacattctccctttttctttgatttgggataaagcctagcagggcagcttgcagggaatgtggtctgcttatggcacttggcttgtgattctccttttcagtgtcatctccttagtcccccaacaaaagacattcacgctcatgtttatgggttagtccttctgtgtcatgttaacagattcagtcatctcccagctcctgggtctctattgtaagttgagggcctctggagaggaatgaggcagaagaaactcagtagtcaggctgcgtgccggccctactgacgggccaggtgcagaggccttgctgcgcactgccgcacctgtcacttgcttccagccttccttgtctaaatagcatgcatgggaatggagatgataataataataaatgagaggaaatggtcgatccagtggaccatttcaaggaaaagccctattcttttaagtggaagcattttattcaacttgactttcttcacagctctgcttctgttatccagagcttttagaggaaatcaagtgcctgcagctgggttgaccaacactgtctttgatagaattaatctagaacaacatcaggtgactcacaggaactgttctcagaagtggaaggccgcctctgattgttcttcaaaccctaccaggttttcagctacttttccaccctggacctaggaaccaccctcccagattttccacgatagttgtggtttaaaatattctcagtgtgctggtacttgttagaacttttttgttcacatggatgtttataccatggaggtggcgagcccctggctggagaggccaaaccctccccgtgtcccctgactggtcccccttgagcatctgcatcccttgctcatggtaccgcctctgccacctccccagggaaacagggctggccacagctgtctcctacatgcacagcaccagcagaagtaaacacgacccttccagaaagcagattagctctgaggtgtagtccagagacacagccagcctctgtgaagtggagccaggagagaaggatgtggctggaatgtcactggctggagctccaagcctcacaataccctctgaaacatccatccagtatttcaagagcaggagctgtgttctgcttctgcattgtaagagagaaacatttttggcaaaaaggagaaagagttcaaagtaggaagataatttttctgacctggaaattaaaaaaacagctgtgtacagagaagggagttgggtcccagtgaccactgccataaaatgccacctgtgtatctggcactctggagaagccgagtcgtggaggctgcacatcgcaggaaggatcccccgtgggtctcacatgacagggcctgaaaactcccacccgcagcagacaaggcatcatggtggtgcgatgctgcccacccctccatgggaacttggaggcgtccactggagacgagctgctgtcttcagcccgtcctcgtctggcagcaaggccccacatggctctgcaggctgcgaggcacacccagaacctcatgccttgagatccaagcagagcggcgagtcgccgctcctctcccgccagaatttcctccacacgggcatctgcatttccagaggactgtgcccagagtgcgatcatctgtaatccacagcacccgttaacagcctggccaaagtgagaccaacagaatttatcagcagcgtccagcccttcccgagttattgtacatacccctctcacctatctcaaaaaacacggaagttcctttgcatcacacaaatagtgggaggtgaggatgaagtaagatcactggaggaatagagaaatgactctccagccctctggtggccatagtaacagggacagaggggaagcacagcggcagggaggtggccgcgatttgctggtgtccgagggatcatttagggtaattaggacagtctgcatccaagctctttggacagcacttacttgcatgacccaaagaaaacattaatgaaaatctcaatgattttcattaatagatagaccccttcataatgagaaacaaaagcagacacagcagggcctcagctggcaacacctctgaactgagcctgcactcaggaggctgccactccattctcacgccattcacactcgtctcgccacccctgcttggtgtctgttctgagaagcacaggaatacccgaggtgaggcacaatgacagtcctccactgttaagctatagcctaattcatatcttacatgtgtccttttaattgaagaggcgaagttggccaaatagaagcacaagtggagtaaacagaacattccccacctgctctgttagggcagtagcgttgctgggcgtgtggaggtcactctgctgccggattctctggtgtttccaggcagccttaccttagctgtcctccattctcattagacttcttacctattttttcagttagccatccttgctgttttcatatctccaatcaatagccctactttcattgagattttcattaatgttttcaataagctcttctcagaaacatcttttcttaaagaactgtgatcataaagggacccagaggcaattgtgatgtcacctcttccgtttcctgagttgatatgaaagttagcactctataaagtgttgcttgctttgactccgtattcagggaaaatgtgacagtcagccaccccagtagagccaaagagcagtcaggatacaaggggagaaatcgagtctactggccaccatcccgttcccatcaggtgatagccaaggtccagcccatagacacacctctgtctccggctgactgaaaaacatgacctggagctctttcagtggccgaaaccccagttgccacttgggcatgtgtgcatgcgtgcacgcacagaataactatttgctgctgaaaactgcaccactttgataccgaacgagtagcttcagctctctgcgactgtgggaagggtccacatggcttctgtgcctcaattcttcatcagccaggctatttattcctaaggtcctagtccctgacatcatcattcagctgtttagaaagtccgttttcccacactgtaactcctcaaactgcaggtccactggttccgagagtacagaacttgtcctctccaccatttcctcatcacacggcctaagggaaaaaagttttatttcatcctttcctcctcagccctgcaagctatcccatagttcctcaaagagcccagtaaatggatttcagtgtacagatgttacaggcctctgctactaaggttttttttttttttttacatgctcctaagctcccagaagcaaaaggcttttacttccaaaagataacaacggtacttgccagtagcacgctgcatggcattgagctgtctcgtctaactcgtgccacagtgcatttgaatcactggcctagggagtgagggttctcatggcttaggtcattttcccccattatcacgatttatttcttcatggtttcatttttagtttcctgtcagtgtaattgtgtgctagctgcatgtacttgctgttgtactgtgtttaaatgattctctaacttcctttggaaagcactaatgaataagtgctgtttctcttctctattgttgggttttttgtaaagttgctcaaatgctctcaggtatggcggctctgaatggaggacttggcgccacaggcttgacgaatggcacggctggcaccatggacgccctcacccaggcctactcaggaattcaacagtacgcagccgccgcgctgcccactctgtacagccagagcctgctgcagcagcagagcgctgcaggcagccagaaggaaggtaggtgccgcccttggccccaggcagggcccagcccaacaggcagcactggcctctagagcacggttagaaggtatcaaattgaactgaacccatgtcataacagaaagcagttgttttgttattcatgtttaaaaaaaaaaaaaactgaaagctgggcatggtggcatacacctgtagtcgcagttacttggcaggttgagatgggaggatcgcttgagcccaggagctgaggctgcagtgagccatggtcatgcctgtgactagccactgcactccattcggggaacacagacatacccctctctctcaaacaaaagcaaaaacctatttatttcagtctttctcacttggtcttatagttaccttctaatttaatttttcatcgatctcttcagatgaagttcttgtccattgtatatttatataccactctggctttgttgataaataaatggttttaattatttcccccagctacatcttctgaagggttatggcatctctgcagatctaagtccaggaaagttgatcacctttcttgcaatccccaaatatcctctcactgctcaccccctgccataattaagttctataaactattaatttcccataaactacttcatagctgctgactgtaaataattcccagggacctccctctcccaagtcagcacagaccatcaccttttccccttacacagaaactacttgttgggggaaggggatggatggccacaggcttctgtgggtgaaacgctctctgtcctgtgtttgccagggttttggagtccacacatcctatgagtgtgtggccggctctcagtaggtgatggttttcaggtgaatgatgaaatccatggttaggattgccttggtctttgtttaattgggggtcttcagggaaagcaagtaagtgatcgattgccttgcttctctgccagtaaagcaaaataaactccaggaagttaatgctaagaataaatgaaagctaattatgaaatggttcatgagtaagaccaaataaggatcactggtcattcttccttacttgaagctcctttagagcaaaatctgctgaatgatatttttttctgacttgtttaaatatgggataaaaagctagaatagagaagcactaagggagattttttgaagtttctttcccttctcttttaccctcaccccatagctccaaactgctttgtctgaagtgggttttaagagaacacagcttaaaagatactcatggtttttttttttttttaaaggaaggaaaaggttttttctttgtataaataacatggatatcacttttaaaatgaaaaatatatgaaagtctaagttacttttcattatttcaactttctctttgactattatggtaggcttttgaaacatgcacaggtgttcagacaactggttccccaggcttgtgaaagagaccctacatcataaacatcacttgtcttcccaaagaaaggcctgtgtgtgttccttttctctgtggtctgagtaccatggtgacaaatgagggcagagagcagggccctgtaggacaatgatatcatcacacagaggccagaaggccagttccccacatggtggtcacctctccactacagagcagggccttccagtaaactctagagcagtttagggatgaagtctgggccctgaaacaacatgtttcgaaacaacatgtttctgaggtttcatctgagcccactgccctcaacttactcgcctggagttttaggggttactgcttagtgcagtaattccccttctgagattaagataaaattgcccaaaataaccattgcccactcctgatttaagagtgcgggttttcagtagcatgcttttgggtttttgatttgttcagtttttctttggaatcatctcccaccttgtcataactctcttctgatccctttctcacccagttaatatgtgctcaagaaatttaaaccatcttcttattagtttaagtaaaacataattttaaaagcaaatgatgccaggcagagcaaaaataataataataataataataataataataataataatgaattccagattttctactccacagttcagtccgaggttgcgagacctggtgtgttttttccccagacaggaagtgagcctctgatggcccgcctctgtccattacctgcaggaggcgagtcccatgaggaatggggacgctggtggactcttacagctttgttcctacaaacgtccccagttctttatgccagatcaagtgccctgtgagagagataaaacatgaacaccccaacagccaggaccagtagtgagtgtaacagagaatctaacaagtgacagtaacgtgcactgggagaaatctgatgaaagggtgacttgtgaacaggtgtttcccatttctagaggaagagagatgacacacaggtagaatcccatttttaaaaaaggtattttgttttttcctcttcatctcagccaccttagttgcatacaagggaggttttccatatgaaatctttttttttttttcattttaatattaaaaactcgggggatatacaaaaccaaactgtttcttggtgatggaaaaattgggggatctatgtcaagagatggtgctgacatttttttcttgggaatatcaggagcaaaaggacaaaacctacttgtgtgcgtttactggtctctctgtttccttggtctctgttgggcatagacaaattcagcatgagcaacattctagaaagctaggattactcaggcatacccagtcatctgtcatgtgcattgaaactgtattttctccccggcttcaggaggtgagatgtacttcacagttcaaactggggcccaataactctcatttgtgcatttggatcttttgtgcagtagcaacatgaaagctggtagcaccaaatctgaccatcagacataccacccaggatgtgcacacacagcagtgctcagaacatccctttccagtgtttcaggttttgcatcttttcatgttaaattttgattcccttaaaaccagaaaacatctggggaccaaaggcccccctgcaattgtgtccctttaaaatagactccttcccatgccctagaatacggatatatcccaggaaattggcagcaatatggaaagttacagtagtcattaagacacacttttaaatgagaaaggaagagttcactctgtggcttccatagtttgcctcaagaagttttctttgtgaaaagtcccaatcattaggatactttcttgtgatgtattttgtggaggcaggggaagaagcttggtttgacatttttacaaagttctttttatccccattttacttttcttcatgccacacagacacccttcccacatctagggaccccagtgcagctatcccctggggttgcctagttgggcaggcaggcctgttcctctcctgtgaaggccagttgaggattcctgacccgctgcagaagtcgcctcaccagttctgtgagcgcccctcctcggaagactccatgcctggaacgcccaagaaacagccagccctcatctccctcagctcatatttatgcccttttgtgccgcttttaactttcacatggtgctcatatgggtgggggagagtcaggagaggaaaagcgagggcagcttaggagcacgcacctctccagccagcagggccaagatctccatcctgcccttgctgcctgtgtttactgggaaaggataggtggacgggcagagcttggcttcctcggtctttgcccagcttctacatccactgcattcatctccaaggctaacgcccaggagagtcattcctctcaaagtcatgagactcaggctaccttctttccttgccttgactcactgccagtcatttctaataaagatgattattagactgtgtgttaagagatttggcaaatcaaaactggctggaaaactaggcaaatgatagagaaatcggagcagcattactgctacatccattattgtcaattgttacaattttttagaatgcacagagcacccttttttccttctcacagcctgtccgtacctgagaaaatacggccacccaagaaaaacccatgccaagattatctgtccccattctgcccactgtcaccttcagccccatgaaaaggtgactgaaatgcatatgccaaggggcagtggcacctgtgactcacagaagactgtcagtggaaaggaagccattcgtaaccagcatctttggaaatcaggaaaatctgaaggatgattgctttcctgaaaggcactccagcacttgacatttatccatctgtttgtttgttcaactaaatgcttagcctacctgttgttaaagtattcctaagaagggactttggaaactaagactcaagggataccttactctgactttttttttcctccttaggtccagagggggcaaacctctttatttaccaccttccacaggaatttggagaccaggacattctgcagatgttcatgccttttggaaatgttatctctgctaaagtcttcattgacaaacagaccaatctgagcaagtgctttggtatgcaaaagaaactaagctagtatattgcagtaggttcccaagtgaagagtcgtgggaaggaaaatgtgagacagtttcagccaggatagggccttccccacattgtgttgggctctgattttctggatccttgtaagcagatttgggcaaagaaaggaaggctctgggaaattaaagtcaacgcccatacattaggtaatcttctatactacactattaaggaatctaaccacaatttagctcatcttccccactaattccttagccctccaggtttagtacaattcagacaccgtggttgtgggcaacaccatattgggggcttattggccttgacatacacgcacacaaagacactttcacagacagacacccattcatcagcaccaacacatccatgtgttcaggctgcttgcgtgatcgcagctccacgtgcccgggatgagcagttgacagatctcacggttacatagcacgctgcatgatgagatctgaagggccaccatcggggagtgggaatgaatgcggagtccaggggcgtgcagctgttatcagagactcagctgccatgccccctttcctcaagcagcctggactctgcctcttgtgggtgtttttcgctcccttagggaggaagggatgctcacagaatggactgatgttttacaccaggacaatagcattcattaaatatattccttgtttcatttttcaaaccctattggcccccaaagcagtttacaggccaggatgttcagagtatatattacttggcaagctcagggcccagtttgagttagagtatttgctttaatcactcctgcaatttaataattcatgctggtgggaaatagtaacagcataaaacccaggtagttaggtaagggctggaggaaacacacagaattctgtgctgtaaaggaaagtagcaaagggagggtggttctcaaacttaactctggctggtaatgagtaatcaggccaaagagaatgttttggcttctaaaactctaatcctaaggtctaatttgtgctatcacccaggaaggtctgaaggcatggttaaaggactccgcatgtcagccacttacagtcaccacgttaccctagcagcaaggctgtcagtcgggacccattcggcggctgctgtggcaactgtataaacccgtgtgacagttcagtagagagggatatgcaaattaaatcattatggggggcgggggggtgtgtctgagcaggagcctactttagggaggcttccctacatgatttacaaggctttgaggctgacttttgtgtttttcgtagctaaacaatattctagatttggaagggaattctgcttcatgatttgatttgagaaaatacttccttgaaaacagattgtttatcagcctacagcctccttaaccatgtgctcatactgatgtaaaccatagctgttagtgtcagcagacaattcttgagcatgatggactggtttccatttttgtggaacgctatagcacccagtttgcttggtgagccagccgcatttcttagggctgccagtcataaggtagtgccccgttccttcctagttcttagccaggttttgttatccatctcacctttgtccatttccattctgtaactatcttgctgttccttgataaagacccagagggaaaggaaagtcagagcaaaaatcttggatcccagatcacatttattgggaatgagacttaataaaaatgtaaacagccacttctttgcaatccagcctacctctgaaaagctgcccagcgttatgccgcatgcccatttttatcagccgagaactgggcagaaaagtcatgtcctcttcttcctcctctagtttgtaaaggaattttctctttagctttaatagcagatggatagaggtgcttagtatagaaccttccgaacagctgacgtttagacctaaatgtaaatcaggaccatagcttcctgtcaccactcggatcagcaccctttacagccttgctatacctctgctgctgcctcccccagtgctggaacagactctgggaccaagatcctcttgtcactgggtctttgcagttctttttcaaaagcttgccttccctgctgtttatggtggaggtcgttgctacagagtaagagatggggaattctcttcagatgattaagttctaagccgttgactatgtatcccccagactttgggagatgccagggagcaatttcctttctgctgaatttactggagctttggaaatggaaagtgagataaggagaaaggcccagcacttccctagtctccttggtattaactccaaatgggtaaaaatcaagtatgagtgagttattctagagtttattcgctaattgacccatcctccagctaaacaggtgtaggctctgtgtgacagacgatggagagctcgagtgacaggctggggcttggcagtatctgctgttctccagcccttcccttcccgagcctgcctgttggcctcacctggctgggacacgtgagcccctaggggcccccacagccctgaaatatttacaccactgcttgtatgagtagcatgtatggacctggggttcttttggagagatactaaaggacttgaaacacaatgatttgagcgagttcagtaagtggaactgaattcagccaaacaattgagtctgaggtttcagtgttgtggggaggggtgtgtgctccatgatgccacatttccagtccagccagctgctccacagctgctcagtgggcacgccccatcatccactcacggtggactcacgatcagttccgcagagctgtgctgggcccgtggggctggcacctcatgctggctcttcagccttccccagagctccagcccccttttctgttttctgctgggcttcctctccaggctgactccctctctcggtattttccaggttttgttagctacgacaatccagtctctgcacaagctgctatccaagctatgaatggctttcagatcggcatgaaacgcttgaaggtgcagctgaagcgttccaaaaacgacagcaaaccttactgatcctaaccccagaggctccctgctctcattttagctttcttagggtaagtcccacgagccagcctgtctcaacagggaaggcagaggaggaccacattgccaacttttaccaagagagacggttatttttacaataaggcctccatgtccccacccacttcccctacccagtttgccataattaaaacttgggctactttgtttctattgagtaattcctcctccagttgtgccactgtattctcctttgttttgcgatttgaatctccttttacctttttttttaatttttttcatttttgcttttttttaaagagaagcatatacacaaataaatggcatcttgagaatttaaaaggcaaacaaacaaacgctaatgtgcaattctaactctgaaaccactggtgccccgagagcactgcctggagaattcacccctccttgcccggcgcccgcccccggagggagggcccggtgcttagaggttaacttggtggcctaggagagggagaagccaggagaagcacttactccaaccacacgtctttccactacatcggcttgttttactaagtaggattttattttagggttcaaagaaacatgacatttattggtcaaaatattacactggttgtctattttgttattgttttattttagtttttagaaaggattaatgtacaaaaagatttagagatctgtttcttaaagctacagggtttaaaaaataaaaatgagtgaaaatacttgatgtttcttgaaagataaatttaataataataaataaatacataaatacataaataaaaaagaaagccacaggcctgtaaattttatttgtaaaaaagcatttctatttttatacaaaatttttactgcctcagaaataatggaagttatttattgcctattgttaacttattgggtacctaaagagcagttctctgtctagctagaaccttctgaagtagtctctagaggaattgttctaggaatgggctttttttcaccgttgaaccctagacctgaagttcatgctttatcctctcgttgtttgtatctgtctgattattttgtttgtaacttccattatctagtttacagttcagtcgtctgactttccccgtatgtcacatttgttgaaactggaccttctccccctgtccctcaccccaaaacacccggaatccatcccctttcgctctctccagatggattctcttggggtttcattgtgctgtggataaggagtgtaagaaatgcaaattatgtgaatggctcggagactccctaatgacctaagatttgcattagtttttctcctgcacccttaaaagtgattttgttgccgctgcatagattctgtgtaactttttactcttccttgttttttccctagacatcttcatgcccgttagttcatcgtttgcctagcatgtccctgtggcgtctcaaaaaaaagtttcatcgtcccgtcattgtttctgatgtctttctgacctcacatcatatttggttctcctactgacctttgatctagtttgacctttgaaatttgcatgtgacctcatctagctatgaattctgggaagtcaatgtgaaaaacattgctgcattcatgcaagactgaaatttattattagacaaattcattatagaaaaaacctgtggcaaaaacgtttctttcttattttttttcttttcctaaaacagacttgaaagtattatacagggattggcattcttcccggtcactggtaacaatagcaatatgtgtccagggacacagaatgttggtttctaacagactacttccaaaaacagtttgagaaaaaaactgtctgattttaagtctctagaggtctgtaatagtttttacatttttcaggcagtgtaaagttttttgataaggccattttaggtggctcactttctcattaagatatatatatagaaccactttttgtagattagtataagaaaaatatttaccctgttttggggcaaatgctacctatttgtgtcaccttttgctgaactcacagttagacaatccatggtttaatgcacatgaaattacctatattttatactgtttcaatgtacaggagaaaggttactgtaaactgtgttatgttggtgcttctgtgaattaagttgtggtttcatcatgagtcttaatgttctttgttgataagacaagtttagaattggtttacttaatacaaaaaaaaaaaaaagaatttcaaaaaaaaaagttgtttgcttaaaaaaaatttcatgtgagggaaaaaaaaaaaacctattccagaataagttttgtgttggcttgtgaagcattgatgtcattttttttaattgtggactatttagatgtgtttgtgttcagcaaaatgtgatctgtttttttcttttaaagaaaaaaagtgaaaatatatagtgccaaattccaaaggtacttccttcctagagcttcagtgtgtttcttgtgagaagtaatttgataacatgggtattttattatgtgttttgtataaatccctaatatttaaaaaaaaaaacaaaacaaaaaaaggttacaaagtttgttaacttgctatcctgtggtcttgttgcctgaaattgttattgtttgttatttctctctgatgttttttgtaagacattgtataagtgcccatgtcccacttttttaaccactccgcacatcagtgctgtgaaggcaacctcaccatgtattttcttcataatctatggaaacctctaaggtgagaaagttttgaacttttaaccctttctacccagagctatctggaatgttgatgactttttatactgtcatgatttgagtttgttttggggtgtttccaatttggatttttttccctgcatctatcctctaagttgtttcggtttgactactttgttctttggttaagatccaaaagaaaacagaaaacaattccacgaggccaatctaaagggaaaaaatcctacactacttttactacttttgattatttctcatttttgggaaaagaattcctaatgtgctactagaattccttcttcagttttaacgagtaattggataaaccctgagggaaaacggaggtagattcagcacctaacaatcctgtatgcttttgagatcacgtttagtgctatgtcctagtctagaatattttcatataccttgcagtaaaacgactttgtggcaggacagtctcttgaggggttttgtttctgtttcctaaatactcctaaataatatttctaatcagccattatgctggggcatctctgatcccagtaggtacctctgaatataccaggtgtctggagttagaagcccatagccctttcccagcctttttggtttttttaattgaacacatttcatctaagtaaagctcagttctttatcacaatttactgaccaaatacctagcaccagttcctgctgccactttttaaagtgccatatgactttctacgaacaggtaccttgctgtcttgacaaatcctaatgtcacgcctacagccccaacacaagctccagtcttcctcttcggcatgccctggaagcttcttggcctcagctccccttccccgctcagcaccctgttaggatcagtgtgtgtggatgggatagccctgggatggaaaggactagcctctactgatgcaaaaaaacaaaaagcaacacaaacgtttccttcttatagcacatgcacttccttacaatgacatgatttgtattatcctcacatgtgtttactactgctggggccttccttcatcctctgagggctattttgtactttctgcagcaatcagcttaataacaacacttattgcacctgtctctctctgagaacacggtgtgtctcgacacgtaccacgtacgtggaaacacaagagcccaccacttgaatttctaagaccatttcattctgaaacttcttatcaattacctaaatctcaacgaaaaacaatttactgaagccgactcccctccccatctccctctcaacctcaacccacctgcatgcatctcccccagaggaaacactgagggtaggggacaggaggctcaggacgcgccctctgaatcgagtgtttcttcttcacaagtcaccaagagaggacatgagggggaaagtccttttttgcccttctccaaaaaataaccttccacagagacaaactgtccttctatccacttttatcttttaataaatatcaaaaggaaaaagctgcaagggtgcaaagggcctgtgccagaagaaaacacacacagggaaaccgctttttttaatcaattgtagagaatagtcatttttaatctaaattagagaattgtgatacaatggcagtcctcaaaggcgtaacgagttcatctttctttcaccataggggttatagttggcttgtgctactctggaatcattttactgtttgtttttattatcttaagtgctaattaaaaaaaaaataaaattttaaaaaaacctgtagtttcattacctttttgaataatgtcatacaaaaaatgtatttgtttttttgtgctgtgagaattgatgtttgtagattaataatcattttgtttagaattacaaaatagtttttaaatattgtctgagaaaagccaaagttaatgcaacctagtggaaactgtaagaccatttgagtattgtttgttttattgatgcatttggattttgttgtttgatggaatttgagccaaaaaaaaaatacgcaggctttcctatttctacaactgattgtacttatgcattttgtaccagtggaactttttatactggagattaaaaaaaaaatggaaatttttgtggcttgctctggtgggcccctgacaatgactgatttcaagtttgatttcgggttgattgattgattgattgatagaaagaaagttgcttttcttttgagaattaaaaactttggcttgatttcttttttccctttgcttatatctagcattagaattttgtcttaaaataacagcggtaagtttcactttttattctgtattgtgcagttacacaataaggtaattagatttagaagtactcagtcactttaagtggataaatgtattagttaaaactttagggtttgcttttttgctgtttagatcaaagttttttctgattcttctgtcctcattgtgaacataaccgtgtagttgaaacagtcaaacttatttttgtaatgtatgttattgtgtgatgcagttttttgcttctgtctccaatattaaaccattttcc

SEQ ID NO: 377 - DNA, 5727 bp, Homo Sapiens
caaaaagggcggtggggcggggggcggggcagggagagggagagaaatccagcagacatctagctctgcctttctttcccagccacagccagggtagggctgataaggcgctgatgcgttgatggcagccttgcagagctagacctgcacttaacttgcagctgcctcccgagcctccaagatgtccacgccctgggtgacaggcggcagggcgctgccccgtgctcccccggctctgctcgacagcagcacgcagtgagagcctcgccgccgccgaggagcaactcatgtaacggcacagccaacaagatgaacggagctttggatcactcagaccaaccagacccagatgccattaagatgtttgtcggacagatcccccggtcatggtcggaaaaggagctgaaagaactttttgagccttacggagccgtctaccagatcaacgtcctccgggaccggagtcagaaccctccgcagagtaaaggttgttgtttcgtaacattttatacaagaaaagctgcacttgaggcccagaatgcactgcacaatattaaaactttacctgggatgcatcatcccattcagatgaaacctgcagatagtgaaaagtccaacgctgtggaagacagaaaattgttcataggaatggtttcgaagaaatgtaatgagaacgacatcagggtgatgttctctccatttggccagatagaagaatgccggatcctccggggacctgatgggctgagtcgaggctgtgcgtttgtcacattttctacaagggcaatggcacagaatgcaatcaaagccatgcatcagtctcagaccatggagggctgctcttcacctatcgtggtgaagtttgctgacactcagaaggacaaagagcaaaggcgcctccagcagcagctcgctcagcagatgcagcagctcaacactgccacctgggggaacctgacagggctgggcggactgaccccacagtatctggcgctcctgcagcaggccacctcctccagcaacctgggtgcgttcagcggcattcaacaaatggcaggcatgaatgctttacagttgcagaacctggcgacgctggctgctgctgcagctgcggcccagacctcagccaccagcaccaatgcaaaccctctctctaccacgagcagcgccctgggagccctcacgagtcccgtggctgcttcaacccccaactccactgctggtgcagccatgaactccttgacctctctcgggactctgcaaggactggctggagccactgttggactgaataatattaatgcactagcagttgctcaaatgctctcaggtatggcggctctgaatggaggacttggcgccacaggcttgacgaatggcacggctggcaccatggacgccctcacccaggcctactcaggaattcaacagtacgcagccgccgcgctgcccactctgtacagccagagcctgctgcagcagcagagcgctgcaggcagccagaaggaaggtccagagggggcaaacctctttatttaccaccttccacaggaatttggagaccaggacattctgcagatgttcatgccttttggaaatgttatctctgctaaagtcttcattgacaaacagaccaatctgagcaagtgctttggttttgttagctacgacaatccagtctctgcacaagctgctatccaagctatgaatggctttcagatcggcatgaaacgcttgaaggtgcagctgaagcgttccaaaaacgacagcaaaccttactgatcctaaccccagaggctccctgctctcattttagctttcttaggacatcttcatgcccgttagttcatcgtttgcctagcatgtccctgtggcgtctcaaaaaaaagtttcatcgtcccgtcattgtttctgatgtctttctgacctcacatcatatttggttctcctactgacctttgatctagtttgacctttgaaatttgcatgtgacctcatctagctatgaattctgggaagtcaatgtgaaaaacattgctgcattcatgcaagactgaaatttattattagacaaattcattatagaaaaaacctgtggcaaaaacgtttctttcttattttttttcttttcctaaaacagacttgaaagtattatacagggattggcattcttcccggtcactggtaacaatagcaatatgtgtccagggacacagaatgttggtttctaacagactacttccaaaaacagtttgagaaaaaaactgtctgattttaagtctctagaggtctgtaatagtttttacatttttcaggcagtgtaaagttttttgataaggccattttaggtggctcactttctcattaagatatatatatagaaccactttttgtagattagtataagaaaaatatttaccctgttttggggcaaatgctacctatttgtgtcaccttttgctgaactcacagttagacaatccatggtttaatgcacatgaaattacctatattttatactgtttcaatgtacaggagaaaggttactgtaaactgtgttatgttggtgcttctgtgaattaagttgtggtttcatcatgagtcttaatgttctttgttgataagacaagtttagaattggtttacttaatacaaaaaaaaaaaaaagaatttcaaaaaaaaaagttgtttgcttaaaaaaaatttcatgtgagggaaaaaaaaaaaacctattccagaataagttttgtgttggcttgtgaagcattgatgtcattttttttaattgtggactatttagatgtgtttgtgttcagcaaaatgtgatctgtttttttcttttaaagaaaaaaagtgaaaatatatagtgccaaattccaaaggtacttccttcctagagcttcagtgtgtttcttgtgagaagtaatttgataacatgggtattttattatgtgttttgtataaatccctaatatttaaaaaaaaaaacaaaacaaaaaaaggttacaaagtttgttaacttgctatcctgtggtcttgttgcctgaaattgttattgtttgttatttctctctgatgttttttgtaagacattgtataagtgcccatgtcccacttttttaaccactccgcacatcagtgctgtgaaggcaacctcaccatgtattttcttcataatctatggaaacctctaaggtgagaaagttttgaacttttaaccctttctacccagagctatctggaatgttgatgactttttatactgtcatgatttgagtttgttttggggtgtttccaatttggatttttttccctgcatctatcctctaagttgtttcggtttgactactttgttctttggttaagatccaaaagaaaacagaaaacaattccacgaggccaatctaaagggaaaaaatcctacactacttttactacttttgattatttctcatttttgggaaaagaattcctaatgtgctactagaattccttcttcagttttaacgagtaattggataaaccctgagggaaaacggaggtagattcagcacctaacaatcctgtatgcttttgagatcacgtttagtgctatgtcctagtctagaatattttcatataccttgcagtaaaacgactttgtggcaggacagtctcttgaggggttttgtttctgtttcctaaatactcctaaataatatttctaatcagccattatgctggggcatctctgatcccagtaggtacctctgaatataccaggtgtctggagttagaagcccatagccctttcccagcctttttggtttttttaattgaacacatttcatctaagtaaagctcagttctttatcacaatttactgaccaaatacctagcaccagttcctgctgccactttttaaagtgccatatgactttctacgaacaggtaccttgctgtcttgacaaatcctaatgtcacgcctacagccccaacacaagctccagtcttcctcttcggcatgccctggaagcttcttggcctcagctccccttccccgctcagcaccctgttaggatcagtgtgtgtggatgggatagccctgggatggaaaggactagcctctactgatgcaaaaaaacaaaaagcaacacaaacgtttccttcttatagcacatgcacttccttacaatgacatgatttgtattatcctcacatgtgtttactactgctggggccttccttcatcctctgagggctattttgtactttctgcagcaatcagcttaataacaacacttattgcacctgtctctctctgagaacacggtgtgtctcgacacgtaccacgtacgtggaaacacaagagcccaccacttgaatttctaagaccatttcattctgaaacttcttatcaattacctaaatctcaacgaaaaacaatttactgaagccgactcccctccccatctccctctcaacctcaacccacctgcatgcatctcccccagaggaaacactgagggtaggggacaggaggctcaggacgcgccctctgaatcgagtgtttcttcttcacaagtcaccaagagaggacatgagggggaaagtccttttttgcccttctccaaaaaataaccttccacagagacaaactgtccttctatccacttttatcttttaataaatatcaaaaggaaaaagctgcaagggtgcaaagggcctgtgccagaagaaaacacacacagggaaaccgctttttttaatcaattgtagagaatagtcatttttaatctaaattagagaattgtgatacaatggcagtcctcaaaggcgtaacgagttcatctttctttcaccataggggttatagttggcttgtgctactctggaatcattttactgtttgtttttattatcttaagtgctaattaaaaaaaaaataaaattttaaaaaaacctgtagtttcattacctttttgaataatgtcatacaaaaaatgtatttgtttttttgtgctgtgagaattgatgtttgtagattaataatcattttgtttagaattacaaaatagtttttaaatattgtctgagaaaagccaaagttaatgcaacctagtggaaactgtaagaccatttgagtattgtttgttttattgatgcatttggattttgttgtttgatggaatttgagccaaaaaaaaaatacgcaggctttcctatttctacaactgattgtacttatgcattttgtaccagtggaactttttatactggagattaaaaaaaaaatggaaatttttgtggcttgctctggtgggcccctgacaatgactgatttcaagtttgatttcgggttgattgattgattgattgatagaaagaaagttgcttttcttttgagaattaaaaactttggcttgatttcttttttccctttgcttatatctagcattagaattttgtcttaaaataacagcggtaagtttcactttttattctgtattgtgcagttacacaataaggtaattagatttagaagtactcagtcactttaagtggataaatgtattagttaaaactttagggtttgcttttttgctgtttagatcaaagttttttctgattcttctgtcctcattgtgaacataaccgtgtagttgaaacagtcaaacttatttttgtaatgtatgttattgtgtgatgcagttttttgcttctgtctccaatattaaaccattttcc

SEQ ID NO: 378 - protein, 490 aa, Homo Sapiens
MNGALDHSDQPDPDAIKMFVGQIPRSWSEKELKELFEPYGAVYQINVLRDRSQNPPQSKGCCFVTFYTRKAALEAQNALHNIKTLPGMHHPIQMKPADSEKSNAVEDRKLFIGMVSKKCNENDIRVMFSPFGQIEECRILRGPDGLSRGCAFVTFSTRAMAQNAIKAMHQSQTMEGCSSPIVVKFADTQKDKEQRRLQQQLAQQMQQLNTATWGNLTGLGGLTPQYLALLQQATSSSNLGAFSGIQQMAGMNALQLQNLATLAAAAAAAQTSATSTNANPLSTTSSALGALTSPVAASTPNSTAGAAMNSLTSLGTLQGLAGATVGLNNINALAVAQMLSGMAALNGGLGATGLTNGTAGTMDALTQAYSGIQQYAAAALPTLYSQSLLQQQSAAGSQKEGPEGANLFIYHLPQEFGDQDILQMFMPFGNVISAKVFIDKQTNLSKCFGFVSYDNPVSAQAAIQAMNGFQIGMKRLKVQLKRSKNDSKPY

SEQ ID NO: 379 - DNA, 6897 bp, Homo Sapiens
cgactgtggcattgatgtttgagcatacttctgaactggcttttgttgagactatcagtatagaagcatgcgctgtcccaaatccgctgttactatgagaaatgaagagctgcttttaagtaacggcacagccaacaagatgaacggagctttggatcactcagaccaaccagacccagatgccattaagatgtttgtcggacagatcccccggtcatggtcggaaaaggagctgaaagaactttttgagccttacggagccgtctaccagatcaacgtcctccgggaccggagtcagaaccctccgcagagtaaaggttgttgtttcgtaacattttatacaagaaaagctgcacttgaggcccagaatgcactgcacaatattaaaactttacctgggatgcatcatcccattcagatgaaacctgcagatagtgaaaagtccaacgctgtggaagacagaaaattgttcataggaatggtttcgaagaaatgtaatgagaacgacatcagggtgatgttctctccatttggccagatagaagaatgccggatcctccggggacctgatgggctgagtcgaggctgtgcgtttgtcacattttctacaagggcaatggcacagaatgcaatcaaagccatgcatcagtctcagaccatggagggctgctcttcacctatcgtggtgaagtttgctgacactcagaaggacaaagagcaaaggcgcctccagcagcagctcgctcagcagatgcagcagctcaacactgccacctgggggaacctgacagggctgggcggactgaccccacagtatctggcgctcctgcagcaggccacctcctccagcaacctgggtgcgttcagcggcattcaacaaatggcaggcatgaatgctttacagttgcagaacctggcgacgctggctgctgctgcagctgcggcccagacctcagccaccagcaccaatgcaaaccctctctctaccacgagcagcgccctgggagccctcacgagtcccgtggctgcttcaacccccaactccactgctggtgcagccatgaactccttgacctctctcgggactctgcaaggactggctggagccactgttggactgaataatattaatgcactagcaggtatggcggctctgaatggaggacttggcgccacaggcttgacgaatggcacggctggcaccatggacgccctcacccaggcctactcaggaattcaacagtacgcagccgccgcgctgcccactctgtacagccagagcctgctgcagcagcagagcgctgcaggcagccagaaggaaggtccagagggggcaaacctctttatttaccaccttccacaggaatttggagaccaggacattctgcagatgttcatgccttttggaaatgttatctctgctaaagtcttcattgacaaacagaccaatctgagcaagtgctttggttttgttagctacgacaatccagtctctgcacaagctgctatccaagctatgaatggctttcagatcggcatgaaacgcttgaaggtgcagctgaagcgttccaaaaacgacagcaaaccttactgatcctaaccccagaggctccctgctctcattttagctttcttagggtaagtcccacgagccagcctgtctcaacagggaaggcagaggaggaccacattgccaacttttaccaagagagacggttatttttacaataaggcctccatgtccccacccacttcccctacccagtttgccataattaaaacttgggctactttgtttctattgagtaattcctcctccagttgtgccactgtattctcctttgttttgcgatttgaatctccttttacctttttttttaatttttttcatttttgcttttttttaaagagaagcatatacacaaataaatggcatcttgagaatttaaaaggcaaacaaacaaacgctaatgtgcaattctaactctgaaaccactggtgccccgagagcactgcctggagaattcacccctccttgcccggcgcccgcccccggagggagggcccggtgcttagaggttaacttggtggcctaggagagggagaagccaggagaagcacttactccaaccacacgtctttccactacatcggcttgttttactaagtaggattttattttagggttcaaagaaacatgacatttattggtcaaaatattacactggttgtctattttgttattgttttattttagtttttagaaaggattaatgtacaaaaagatttagagatctgtttcttaaagctacagggtttaaaaaataaaaatgagtgaaaatacttgatgtttcttgaaagataaatttaataataataaataaatacataaatacataaataaaaaagaaagccacaggcctgtaaattttatttgtaaaaaagcatttctatttttatacaaaatttttactgcctcagaaataatggaagttatttattgcctattgttaacttattgggtacctaaagagcagttctctgtctagctagaaccttctgaagtagtctctagaggaattgttctaggaatgggctttttttcaccgttgaaccctagacctgaagttcatgctttatcctctcgttgtttgtatctgtctgattattttgtttgtaacttccattatctagtttacagttcagtcgtctgactttccccgtatgtcacatttgttgaaactggaccttctccccctgtccctcaccccaaaacacccggaatccatcccctttcgctctctccagatggattctcttggggtttcattgtgctgtggataaggagtgtaagaaatgcaaattatgtgaatggctcggagactccctaatgacctaagatttgcattagtttttctcctgcacccttaaaagtgattttgttgccgctgcatagattctgtgtaactttttactcttccttgttttttccctagacatcttcatgcccgttagttcatcgtttgcctagcatgtccctgtggcgtctcaaaaaaaagtttcatcgtcccgtcattgtttctgatgtctttctgacctcacatcatatttggttctcctactgacctttgatctagtttgacctttgaaatttgcatgtgacctcatctagctatgaattctgggaagtcaatgtgaaaaacattgctgcattcatgcaagactgaaatttattattagacaaattcattatagaaaaaacctgtggcaaaaacgtttctttcttattttttttcttttcctaaaacagacttgaaagtattatacagggattggcattcttcccggtcactggtaacaatagcaatatgtgtccagggacacagaatgttggtttctaacagactacttccaaaaacagtttgagaaaaaaactgtctgattttaagtctctagaggtctgtaatagtttttacatttttcaggcagtgtaaagttttttgataaggccattttaggtggctcactttctcattaagatatatatatagaaccactttttgtagattagtataagaaaaatatttaccctgttttggggcaaatgctacctatttgtgtcaccttttgctgaactcacagttagacaatccatggtttaatgcacatgaaattacctatattttatactgtttcaatgtacaggagaaaggttactgtaaactgtgttatgttggtgcttctgtgaattaagttgtggtttcatcatgagtcttaatgttctttgttgataagacaagtttagaattggtttacttaatacaaaaaaaaaaaaaagaatttcaaaaaaaaaagttgtttgcttaaaaaaaatttcatgtgagggaaaaaaaaaaaacctattccagaataagttttgtgttggcttgtgaagcattgatgtcattttttttaattgtggactatttagatgtgtttgtgttcagcaaaatgtgatctgtttttttcttttaaagaaaaaaagtgaaaatatatagtgccaaattccaaaggtacttccttcctagagcttcagtgtgtttcttgtgagaagtaatttgataacatgggtattttattatgtgttttgtataaatccctaatatttaaaaaaaaaaacaaaacaaaaaaaggttacaaagtttgttaacttgctatcctgtggtcttgttgcctgaaattgttattgtttgttatttctctctgatgttttttgtaagacattgtataagtgcccatgtcccacttttttaaccactccgcacatcagtgctgtgaaggcaacctcaccatgtattttcttcataatctatggaaacctctaaggtgagaaagttttgaacttttaaccctttctacccagagctatctggaatgttgatgactttttatactgtcatgatttgagtttgttttggggtgtttccaatttggatttttttccctgcatctatcctctaagttgtttcggtttgactactttgttctttggttaagatccaaaagaaaacagaaaacaattccacgaggccaatctaaagggaaaaaatcctacactacttttactacttttgattatttctcatttttgggaaaagaattcctaatgtgctactagaattccttcttcagttttaacgagtaattggataaaccctgagggaaaacggaggtagattcagcacctaacaatcctgtatgcttttgagatcacgtttagtgctatgtcctagtctagaatattttcatataccttgcagtaaaacgactttgtggcaggacagtctcttgaggggttttgtttctgtttcctaaatactcctaaataatatttctaatcagccattatgctggggcatctctgatcccagtaggtacctctgaatataccaggtgtctggagttagaagcccatagccctttcccagcctttttggtttttttaattgaacacatttcatctaagtaaagctcagttctttatcacaatttactgaccaaatacctagcaccagttcctgctgccactttttaaagtgccatatgactttctacgaacaggtaccttgctgtcttgacaaatcctaatgtcacgcctacagccccaacacaagctccagtcttcctcttcggcatgccctggaagcttcttggcctcagctccccttccccgctcagcaccctgttaggatcagtgtgtgtggatgggatagccctgggatggaaaggactagcctctactgatgcaaaaaaacaaaaagcaacacaaacgtttccttcttatagcacatgcacttccttacaatgacatgatttgtattatcctcacatgtgtttactactgctggggccttccttcatcctctgagggctattttgtactttctgcagcaatcagcttaataacaacacttattgcacctgtctctctctgagaacacggtgtgtctcgacacgtaccacgtacgtggaaacacaagagcccaccacttgaatttctaagaccatttcattctgaaacttcttatcaattacctaaatctcaacgaaaaacaatttactgaagccgactcccctccccatctccctctcaacctcaacccacctgcatgcatctcccccagaggaaacactgagggtaggggacaggaggctcaggacgcgccctctgaatcgagtgtttcttcttcacaagtcaccaagagaggacatgagggggaaagtccttttttgcccttctccaaaaaataaccttccacagagacaaactgtccttctatccacttttatcttttaataaatatcaaaaggaaaaagctgcaagggtgcaaagggcctgtgccagaagaaaacacacacagggaaaccgctttttttaatcaattgtagagaatagtcatttttaatctaaattagagaattgtgatacaatggcagtcctcaaaggcgtaacgagttcatctttctttcaccataggggttatagttggcttgtgctactctggaatcattttactgtttgtttttattatcttaagtgctaattaaaaaaaaaataaaattttaaaaaaacctgtagtttcattacctttttgaataatgtcatacaaaaaatgtatttgtttttttgtgctgtgagaattgatgtttgtagattaataatcattttgtttagaattacaaaatagtttttaaatattgtctgagaaaagccaaagttaatgcaacctagtggaaactgtaagaccatttgagtattgtttgttttattgatgcatttggattttgttgtttgatggaatttgagccaaaaaaaaaatacgcaggctttcctatttctacaactgattgtacttatgcattttgtaccagtggaactttttatactggagattaaaaaaaaaatggaaatttttgtggcttgctctggtgggcccctgacaatgactgatttcaagtttgatttcgggttgattgattgattgattgatagaaagaaagttgcttttcttttgagaattaaaaactttggcttgatttcttttttccctttgcttatatctagcattagaattttgtcttaaaataacagcggtaagtttcactttttattctgtattgtgcagttacacaataaggtaattagatttagaagtactcagtcactttaagtggataaatgtattagttaaaactttagggtttgcttttttgctgtttagatcaaagttttttctgattcttctgtcctcattgtgaacataaccgtgtagttgaaacagtcaaacttatttttgtaatgtatgttattgtgtgatgcagttttttgcttctgtctccaatattaaaccattttcc

SEQ ID NO: 380 - protein, 508 aa, Homo Sapiens
MRCPKSAVTMRNEELLLSNGTANKMNGALDHSDQPDPDAIKMFVGQIPRSWSEKELKELFEPYGAVYQINVLRDRSQNPPQSKGCCFVTFYTRKAALEAQNALHNIKTLPGMHHPIQMKPADSEKSNAVEDRKLFIGMVSKKCNENDIRVMFSPFGQIEECRILRGPDGLSRGCAFVTFSTRAMAQNAIKAMHQSQTMEGCSSPIVVKFADTQKDKEQRRLQQQLAQQMQQLNTATWGNLTGLGGLTPQYLALLQQATSSSNLGAFSGIQQMAGMNALQLQNLATLAAAAAAAQTSATSTNANPLSTTSSALGALTSPVAASTPNSTAGAAMNSLTSLGTLQGLAGATVGLNNINALAGMAALNGGLGATGLTNGTAGTMDALTQAYSGIQQYAAAALPTLYSQSLLQQQSAAGSQKEGPEGANLFIYHLPQEFGDQDILQMFMPFGNVISAKVFIDKQTNLSKCFGFVSYDNPVSAQAAIQAMNGFQIGMKRLKVQLKRSKNDSKPY

SEQ ID NO: 381 - DNA, 5640 bp, Homo Sapiens
acaagtgccggctcggcggccgccgggggaggccgcgcgcacctgtccctgcccgtctcgcgccgcccgcggccgctcggacgcgcgcagagccgccccccgccgctgccgccgcgtgcgcccgcgaacatgacttctgccttcaagctggatttcctcccggacatgatggtcgagggccgcctgctcgttcctgacagaattaacggcacagccaacaagatgaacggagctttggatcactcagaccaaccagacccagatgccattaagatgtttgtcggacagatcccccggtcatggtcggaaaaggagctgaaagaactttttgagccttacggagccgtctaccagatcaacgtcctccgggaccggagtcagaaccctccgcagagtaaaggttgttgtttcgtaacattttatacaagaaaagctgcacttgaggcccagaatgcactgcacaatattaaaactttacctgggatgcatcatcccattcagatgaaacctgcagatagtgaaaagtccaacgctgtggaagacagaaaattgttcataggaatggtttcgaagaaatgtaatgagaacgacatcagggtgatgttctctccatttggccagatagaagaatgccggatcctccggggacctgatgggctgagtcgaggctgtgcgtttgtcacattttctacaagggcaatggcacagaatgcaatcaaagccatgcatcagtctcagaccatggagggctgctcttcacctatcgtggtgaagtttgctgacactcagaaggacaaagagcaaaggcgcctccagcagcagctcgctcagcagatgcagcagctcaacactgccacctgggggaacctgacagggctgggcggactgaccccacagtatctggcgctcctgcagcaggccacctcctccagcaacctgggtgcgttcagcggcattcaacaaatggcaggcatgaatgctttacagttgcagaacctggcgacgctggctgctgctgcagctgcggcccagacctcagccaccagcaccaatgcaaaccctctctctaccacgagcagcgccctgggagccctcacgagtcccgtggctgcttcaacccccaactccactgctggtgcagccatgaactccttgacctctctcgggactctgcaaggactggctggagccactgttggactgaataatattaatgcactagcagttgctcaaatgctctcaggtatggcggctctgaatggaggacttggcgccacaggcttgacgaatggcacggctggcaccatggacgccctcacccaggcctactcaggaattcaacagtacgcagccgccgcgctgcccactctgtacagccagagcctgctgcagcagcagagcgctgcaggcagccagaaggaaggtccagagggggcaaacctctttatttaccaccttccacaggaatttggagaccaggacattctgcagatgttcatgccttttggaaatgttatctctgctaaagtcttcattgacaaacagaccaatctgagcaagtgctttggttttgttagctacgacaatccagtctctgcacaagctgctatccaagctatgaatggctttcagatcggcatgaaacgcttgaaggtgcagctgaagcgttccaaaaacgacagcaaaccttactgatcctaaccccagaggctccctgctctcattttagctttcttaggacatcttcatgcccgttagttcatcgtttgcctagcatgtccctgtggcgtctcaaaaaaaagtttcatcgtcccgtcattgtttctgatgtctttctgacctcacatcatatttggttctcctactgacctttgatctagtttgacctttgaaatttgcatgtgacctcatctagctatgaattctgggaagtcaatgtgaaaaacattgctgcattcatgcaagactgaaatttattattagacaaattcattatagaaaaaacctgtggcaaaaacgtttctttcttattttttttcttttcctaaaacagacttgaaagtattatacagggattggcattcttcccggtcactggtaacaatagcaatatgtgtccagggacacagaatgttggtttctaacagactacttccaaaaacagtttgagaaaaaaactgtctgattttaagtctctagaggtctgtaatagtttttacatttttcaggcagtgtaaagttttttgataaggccattttaggtggctcactttctcattaagatatatatatagaaccactttttgtagattagtataagaaaaatatttaccctgttttggggcaaatgctacctatttgtgtcaccttttgctgaactcacagttagacaatccatggtttaatgcacatgaaattacctatattttatactgtttcaatgtacaggagaaaggttactgtaaactgtgttatgttggtgcttctgtgaattaagttgtggtttcatcatgagtcttaatgttctttgttgataagacaagtttagaattggtttacttaatacaaaaaaaaaaaaaagaatttcaaaaaaaaaagttgtttgcttaaaaaaaatttcatgtgagggaaaaaaaaaaaacctattccagaataagttttgtgttggcttgtgaagcattgatgtcattttttttaattgtggactatttagatgtgtttgtgttcagcaaaatgtgatctgtttttttcttttaaagaaaaaaagtgaaaatatatagtgccaaattccaaaggtacttccttcctagagcttcagtgtgtttcttgtgagaagtaatttgataacatgggtattttattatgtgttttgtataaatccctaatatttaaaaaaaaaaacaaaacaaaaaaaggttacaaagtttgttaacttgctatcctgtggtcttgttgcctgaaattgttattgtttgttatttctctctgatgttttttgtaagacattgtataagtgcccatgtcccacttttttaaccactccgcacatcagtgctgtgaaggcaacctcaccatgtattttcttcataatctatggaaacctctaaggtgagaaagttttgaacttttaaccctttctacccagagctatctggaatgttgatgactttttatactgtcatgatttgagtttgttttggggtgtttccaatttggatttttttccctgcatctatcctctaagttgtttcggtttgactactttgttctttggttaagatccaaaagaaaacagaaaacaattccacgaggccaatctaaagggaaaaaatcctacactacttttactacttttgattatttctcatttttgggaaaagaattcctaatgtgctactagaattccttcttcagttttaacgagtaattggataaaccctgagggaaaacggaggtagattcagcacctaacaatcctgtatgcttttgagatcacgtttagtgctatgtcctagtctagaatattttcatataccttgcagtaaaacgactttgtggcaggacagtctcttgaggggttttgtttctgtttcctaaatactcctaaataatatttctaatcagccattatgctggggcatctctgatcccagtaggtacctctgaatataccaggtgtctggagttagaagcccatagccctttcccagcctttttggtttttttaattgaacacatttcatctaagtaaagctcagttctttatcacaatttactgaccaaatacctagcaccagttcctgctgccactttttaaagtgccatatgactttctacgaacaggtaccttgctgtcttgacaaatcctaatgtcacgcctacagccccaacacaagctccagtcttcctcttcggcatgccctggaagcttcttggcctcagctccccttccccgctcagcaccctgttaggatcagtgtgtgtggatgggatagccctgggatggaaaggactagcctctactgatgcaaaaaaacaaaaagcaacacaaacgtttccttcttatagcacatgcacttccttacaatgacatgatttgtattatcctcacatgtgtttactactgctggggccttccttcatcctctgagggctattttgtactttctgcagcaatcagcttaataacaacacttattgcacctgtctctctctgagaacacggtgtgtctcgacacgtaccacgtacgtggaaacacaagagcccaccacttgaatttctaagaccatttcattctgaaacttcttatcaattacctaaatctcaacgaaaaacaatttactgaagccgactcccctccccatctccctctcaacctcaacccacctgcatgcatctcccccagaggaaacactgagggtaggggacaggaggctcaggacgcgccctctgaatcgagtgtttcttcttcacaagtcaccaagagaggacatgagggggaaagtccttttttgcccttctccaaaaaataaccttccacagagacaaactgtccttctatccacttttatcttttaataaatatcaaaaggaaaaagctgcaagggtgcaaagggcctgtgccagaagaaaacacacacagggaaaccgctttttttaatcaattgtagagaatagtcatttttaatctaaattagagaattgtgatacaatggcagtcctcaaaggcgtaacgagttcatctttctttcaccataggggttatagttggcttgtgctactctggaatcattttactgtttgtttttattatcttaagtgctaattaaaaaaaaaataaaattttaaaaaaacctgtagtttcattacctttttgaataatgtcatacaaaaaatgtatttgtttttttgtgctgtgagaattgatgtttgtagattaataatcattttgtttagaattacaaaatagtttttaaatattgtctgagaaaagccaaagttaatgcaacctagtggaaactgtaagaccatttgagtattgtttgttttattgatgcatttggattttgttgtttgatggaatttgagccaaaaaaaaaatacgcaggctttcctatttctacaactgattgtacttatgcattttgtaccagtggaactttttatactggagattaaaaaaaaaatggaaatttttgtggcttgctctggtgggcccctgacaatgactgatttcaagtttgatttcgggttgattgattgattgattgatagaaagaaagttgcttttcttttgagaattaaaaactttggcttgatttcttttttccctttgcttatatctagcattagaattttgtcttaaaataacagcggtaagtttcactttttattctgtattgtgcagttacacaataaggtaattagatttagaagtactcagtcactttaagtggataaatgtattagttaaaactttagggtttgcttttttgctgtttagatcaaagttttttctgattcttctgtcctcattgtgaacataaccgtgtagttgaaacagtcaaacttatttttgtaatgtatgttattgtgtgatgcagttttttgcttctgtctccaatattaaaccattttcc

SEQ ID NO: 382 - protein, 509 aa, Homo Sapiens
MMVEGRLLVPDRINGTANKMNGALDHSDQPDPDAIKMFVGQIPRSWSEKELKELFEPYGAVYQINVLRDRSQNPPQSKGCCFVTFYTRKAALEAQNALHNIKTLPGMHHPIQMKPADSEKSNAVEDRKLFIGMVSKKCNENDIRVMFSPFGQIEECRILRGPDGLSRGCAFVTFSTRAMAQNAIKAMHQSQTMEGCSSPIVVKFADTQKDKEQRRLQQQLAQQMQQLNTATWGNLTGLGGLTPQYLALLQQATSSSNLGAFSGIQQMAGMNALQLQNLATLAAAAAAAQTSATSTNANPLSTTSSALGALTSPVAASTPNSTAGAAMNSLTSLGTLQGLAGATVGLNNINALAVAQMLSGMAALNGGLGATGLTNGTAGTMDALTQAYSGIQQYAAAALPTLYSQSLLQQQSAAGSQKEGPEGANLFIYHLPQEFGDQDILQMFMPFGNVISAKVFIDKQTNLSKCFGFVSYDNPVSAQAAIQAMNGFQIGMKRLKVQLKRSKNDSKPY

SEQ ID NO: 383 - DNA, 5721 bp, Homo Sapiens
caaaaagggcggtggggcggggggcggggcagggagagggagagaaatccagcagacatctagctctgcctttctttcccagccacagccagggtagggctgataaggcgctgatgcgttgatggcagccttgcagagctagacctgcacttaacttgcagctgcctcccgagcctccaagatgtccacgccctgggtgacaggcggcagggcgctgccccgtgctcccccggctctgctcgacagcagcacgcagtgagagcctcgccgccgccgaggagcaactcatgtaacggcacagccaacaagatgaacggagctttggatcactcagaccaaccagacccagatgccattaagatgtttgtcggacagatcccccggtcatggtcggaaaaggagctgaaagaactttttgagccttacggagccgtctaccagatcaacgtcctccgggaccggagtcagaaccctccgcagagtaaaggttgttgtttcgtaacattttatacaagaaaagctgcacttgaggcccagaatgcactgcacaatattaaaactttacctgggatgcatcatcccattcagatgaaacctgcagatagtgaaaagtccaacgctgtggaagacagaaaattgttcataggaatggtttcgaagaaatgtaatgagaacgacatcagggtgatgttctctccatttggccagatagaagaatgccggatcctccggggacctgatgggctgagtcgaggctgtgcgtttgtcacattttctacaagggcaatggcacagaatgcaatcaaagccatgcatcagtctcagaccatggagggctgctcttcacctatcgtggtgaagtttgctgacactcagaaggacaaagagcaaaggcgcctccagcagcagctcgctcagcagatgcagcagctcaacactgccacctgggggaacctgacagggctgggcggactgaccccacagtatctggcgctcctgcagcaggccacctcctccagcaacctgggtgcgttcagcggcattcaacaaatggcaggcatgaatgctttacagttgcagaacctggcgacgctggctgctgctgcagctgcggcccagacctcagccaccagcaccaatgcaaaccctctctctaccacgagcagcgccctgggagccctcacgagtcccgtggctgcttcaacccccaactccactgctggtgcagccatgaactccttgacctctctcgggactctgcaaggactggctggagccactgttggactgaataatattaatgcactagcaggtaccatcaacagtatggcggctctgaatggaggacttggcgccacaggcttgacgaatggcacggctggcaccatggacgccctcacccaggcctactcaggaattcaacagtacgcagccgccgcgctgcccactctgtacagccagagcctgctgcagcagcagagcgctgcaggcagccagaaggaaggtccagagggggcaaacctctttatttaccaccttccacaggaatttggagaccaggacattctgcagatgttcatgccttttggaaatgttatctctgctaaagtcttcattgacaaacagaccaatctgagcaagtgctttggttttgttagctacgacaatccagtctctgcacaagctgctatccaagctatgaatggctttcagatcggcatgaaacgcttgaaggtgcagctgaagcgttccaaaaacgacagcaaaccttactgatcctaaccccagaggctccctgctctcattttagctttcttaggacatcttcatgcccgttagttcatcgtttgcctagcatgtccctgtggcgtctcaaaaaaaagtttcatcgtcccgtcattgtttctgatgtctttctgacctcacatcatatttggttctcctactgacctttgatctagtttgacctttgaaatttgcatgtgacctcatctagctatgaattctgggaagtcaatgtgaaaaacattgctgcattcatgcaagactgaaatttattattagacaaattcattatagaaaaaacctgtggcaaaaacgtttctttcttattttttttcttttcctaaaacagacttgaaagtattatacagggattggcattcttcccggtcactggtaacaatagcaatatgtgtccagggacacagaatgttggtttctaacagactacttccaaaaacagtttgagaaaaaaactgtctgattttaagtctctagaggtctgtaatagtttttacatttttcaggcagtgtaaagttttttgataaggccattttaggtggctcactttctcattaagatatatatatagaaccactttttgtagattagtataagaaaaatatttaccctgttttggggcaaatgctacctatttgtgtcaccttttgctgaactcacagttagacaatccatggtttaatgcacatgaaattacctatattttatactgtttcaatgtacaggagaaaggttactgtaaactgtgttatgttggtgcttctgtgaattaagttgtggtttcatcatgagtcttaatgttctttgttgataagacaagtttagaattggtttacttaatacaaaaaaaaaaaaaagaatttcaaaaaaaaaagttgtttgcttaaaaaaaatttcatgtgagggaaaaaaaaaaaacctattccagaataagttttgtgttggcttgtgaagcattgatgtcattttttttaattgtggactatttagatgtgtttgtgttcagcaaaatgtgatctgtttttttcttttaaagaaaaaaagtgaaaatatatagtgccaaattccaaaggtacttccttcctagagcttcagtgtgtttcttgtgagaagtaatttgataacatgggtattttattatgtgttttgtataaatccctaatatttaaaaaaaaaaacaaaacaaaaaaaggttacaaagtttgttaacttgctatcctgtggtcttgttgcctgaaattgttattgtttgttatttctctctgatgttttttgtaagacattgtataagtgcccatgtcccacttttttaaccactccgcacatcagtgctgtgaaggcaacctcaccatgtattttcttcataatctatggaaacctctaaggtgagaaagttttgaacttttaaccctttctacccagagctatctggaatgttgatgactttttatactgtcatgatttgagtttgttttggggtgtttccaatttggatttttttccctgcatctatcctctaagttgtttcggtttgactactttgttctttggttaagatccaaaagaaaacagaaaacaattccacgaggccaatctaaagggaaaaaatcctacactacttttactacttttgattatttctcatttttgggaaaagaattcctaatgtgctactagaattccttcttcagttttaacgagtaattggataaaccctgagggaaaacggaggtagattcagcacctaacaatcctgtatgcttttgagatcacgtttagtgctatgtcctagtctagaatattttcatataccttgcagtaaaacgactttgtggcaggacagtctcttgaggggttttgtttctgtttcctaaatactcctaaataatatttctaatcagccattatgctggggcatctctgatcccagtaggtacctctgaatataccaggtgtctggagttagaagcccatagccctttcccagcctttttggtttttttaattgaacacatttcatctaagtaaagctcagttctttatcacaatttactgaccaaatacctagcaccagttcctgctgccactttttaaagtgccatatgactttctacgaacaggtaccttgctgtcttgacaaatcctaatgtcacgcctacagccccaacacaagctccagtcttcctcttcggcatgccctggaagcttcttggcctcagctccccttccccgctcagcaccctgttaggatcagtgtgtgtggatgggatagccctgggatggaaaggactagcctctactgatgcaaaaaaacaaaaagcaacacaaacgtttccttcttatagcacatgcacttccttacaatgacatgatttgtattatcctcacatgtgtttactactgctggggccttccttcatcctctgagggctattttgtactttctgcagcaatcagcttaataacaacacttattgcacctgtctctctctgagaacacggtgtgtctcgacacgtaccacgtacgtggaaacacaagagcccaccacttgaatttctaagaccatttcattctgaaacttcttatcaattacctaaatctcaacgaaaaacaatttactgaagccgactcccctccccatctccctctcaacctcaacccacctgcatgcatctcccccagaggaaacactgagggtaggggacaggaggctcaggacgcgccctctgaatcgagtgtttcttcttcacaagtcaccaagagaggacatgagggggaaagtccttttttgcccttctccaaaaaataaccttccacagagacaaactgtccttctatccacttttatcttttaataaatatcaaaaggaaaaagctgcaagggtgcaaagggcctgtgccagaagaaaacacacacagggaaaccgctttttttaatcaattgtagagaatagtcatttttaatctaaattagagaattgtgatacaatggcagtcctcaaaggcgtaacgagttcatctttctttcaccataggggttatagttggcttgtgctactctggaatcattttactgtttgtttttattatcttaagtgctaattaaaaaaaaaataaaattttaaaaaaacctgtagtttcattacctttttgaataatgtcatacaaaaaatgtatttgtttttttgtgctgtgagaattgatgtttgtagattaataatcattttgtttagaattacaaaatagtttttaaatattgtctgagaaaagccaaagttaatgcaacctagtggaaactgtaagaccatttgagtattgtttgttttattgatgcatttggattttgttgtttgatggaatttgagccaaaaaaaaaatacgcaggctttcctatttctacaactgattgtacttatgcattttgtaccagtggaactttttatactggagattaaaaaaaaaatggaaatttttgtggcttgctctggtgggcccctgacaatgactgatttcaagtttgatttcgggttgattgattgattgattgatagaaagaaagttgcttttcttttgagaattaaaaactttggcttgatttcttttttccctttgcttatatctagcattagaattttgtcttaaaataacagcggtaagtttcactttttattctgtattgtgcagttacacaataaggtaattagatttagaagtactcagtcactttaagtggataaatgtattagttaaaactttagggtttgcttttttgctgtttagatcaaagttttttctgattcttctgtcctcattgtgaacataaccgtgtagttgaaacagtcaaacttatttttgtaatgtatgttattgtgtgatgcagttttttgcttctgtctccaatattaaaccattttcc

SEQ ID NO: 384 - protein, 488 aa, Homo Sapiens
MNGALDHSDQPDPDAIKMFVGQIPRSWSEKELKELFEPYGAVYQINVLRDRSQNPPQSKGCCFVTFYTRKAALEAQNALHNIKTLPGMHHPIQMKPADSEKSNAVEDRKLFIGMVSKKCNENDIRVMFSPFGQIEECRILRGPDGLSRGCAFVTFSTRAMAQNAIKAMHQSQTMEGCSSPIVVKFADTQKDKEQRRLQQQLAQQMQQLNTATWGNLTGLGGLTPQYLALLQQATSSSNLGAFSGIQQMAGMNALQLQNLATLAAAAAAAQTSATSTNANPLSTTSSALGALTSPVAASTPNSTAGAAMNSLTSLGTLQGLAGATVGLNNINALAGTINSMAALNGGLGATGLTNGTAGTMDALTQAYSGIQQYAAAALPTLYSQSLLQQQSAAGSQKEGPEGANLFIYHLPQEFGDQDILQMFMPFGNVISAKVFIDKQTNLSKCFGFVSYDNPVSAQAAIQAMNGFQIGMKRLKVQLKRSKNDSKPY

SEQ ID NO: 385 - DNA, 1956 bp, Homo Sapiens
acaagtgccggctcggcggccgccgggggaggccgcgcgcacctgtccctgcccgtctcgcgccgcccgcggccgctcggacgcgcgcagagccgccccccgccgctgccgccgcgtgcgcccgcgaacatgacttctgccttcaagctggatttcctcccggacatgatggtcgagggccgcctgctcgttcctgacagaattaacggcacagccaacaagatgaacggagctttggatcactcagaccaaccagacccagatgccattaagatgtttgtcggacagatcccccggtcatggtcggaaaaggagctgaaagaactttttgagccttacggagccgtctaccagatcaacgtcctccgggaccggagtcagaaccctccgcagagtaaaggttgttgtttcgtaacattttatacaagaaaagctgcacttgaggcccagaatgcactgcacaatattaaaactttacctgggatgcatcatcccattcagatgaaacctgcagatagtgaaaagtccaacgctgtggaagacagaaaattgttcataggaatggtttcgaagaaatgtaatgagaacgacatcagggtgatgttctctccatttggccagatagaagaatgccggatcctccggggacctgatgggctgagtcgaggctgtgcgtttgtcacattttctacaagggcaatggcacagaatgcaatcaaagccatgcatcagtctcagaccatggagggctgctcttcacctatcgtggtgaagtttgctgacactcagaaggacaaagagcaaaggcgcctccagcagcagctcgctcagcagatgcagcagctcaacactgccacctgggggaacctgacagggctgggcggactgaccccacagtatctggcgctcctgcagcaggccacctcctccagcaacctgggtgcgttcagcggcattcaacaaatggcaggcatgaatgctttacagttgcagaacctggcgacgctggctgctgctgcagctgcggcccagacctcagccaccagcaccaatgcaaaccctctctctaccacgagcagcgccctgggagccctcacgagtcccgtggctgcttcaacccccaactccactgctggtgcagccatgaactccttgacctctctcgggactctgcaaggactggctggagccactgttggactgaataatattaatgcactagcaggtaccatcaacactcccagaagcaaaaggcttttacttccaaaagataacaacggtatggcggctctgaatggaggacttggcgccacaggcttgacgaatggcacggctggcaccatggacgccctcacccaggcctactcaggaattcaacagtacgcagccgccgcgctgcccactctgtacagccagagcctgctgcagcagcagagcgctgcaggcagccagaaggaaggtccagagggggcaaacctctttatttaccaccttccacaggaatttggagaccaggacattctgcagatgttcatgccttttggaaatgttatctctgctaaagtcttcattgacaaacagaccaatctgagcaagtgctttggttttgttagctacgacaatccagtctctgcacaagctgctatccaagctatgaatggctttcagatcggcatgaaacgcttgaaggtgcagctgaagcgttccaaaaacgacagcaaaccttactgatcctaaccccagaggctccctgctctcattttagctttcttagggtaagtcccacgagccagcctgtctcaacagggaaggcagaggaggaccacattgccaacttttaccaagagagacggttatttttacaataaggcctccatgtccccacccacttcccctacccagtttgccataattaaaacttgggctactttgtttctattgagtaattcctcctcc

SEQ ID NO: 386 - protein, 521 aa, Homo Sapiens
MMVEGRLLVPDRINGTANKMNGALDHSDQPDPDAIKMFVGQIPRSWSEKELKELFEPYGAVYQINVLRDRSQNPPQSKGCCFVTFYTRKAALEAQNALHNIKTLPGMHHPIQMKPADSEKSNAVEDRKLFIGMVSKKCNENDIRVMFSPFGQIEECRILRGPDGLSRGCAFVTFSTRAMAQNAIKAMHQSQTMEGCSSPIVVKFADTQKDKEQRRLQQQLAQQMQQLNTATWGNLTGLGGLTPQYLALLQQATSSSNLGAFSGIQQMAGMNALQLQNLATLAAAAAAAQTSATSTNANPLSTTSSALGALTSPVAASTPNSTAGAAMNSLTSLGTLQGLAGATVGLNNINALAGTINTPRSKRLLLPKDNNGMAALNGGLGATGLTNGTAGTMDALTQAYSGIQQYAAAALPTLYSQSLLQQQSAAGSQKEGPEGANLFIYHLPQEFGDQDILQMFMPFGNVISAKVFIDKQTNLSKCFGFVSYDNPVSAQAAIQAMNGFQIGMKRLKVQLKRSKNDSKPY

SEQ ID NO: 387 - DNA, 135652 bp, Mus Musculus
  misc_feature (1)...(135652): n = A,T,C or G
agtccaaaatggcggctctcaggctggcgcgctccgtgctgctgaggctttgaggtggtcgctccgggtcggaggggggacgatttccccgccgcggggcccccagagaatgaatcgggggctctgctgaggcgaggcggcagggctggagagcagtggcagcgaagggctgcggtggcgtccacgcagcgggatgtgcgagagttactctaggtcgttgttgagggtctcggtggcgcagatctgccaggcgctgggctgggactcggtgcagctcagcgcctgccacctcctcaccgacgtcctgcagcgctatctgcagcagctgggccggggctgccatcggtactctgaactctgtgagtactggggctgggttgcgggagggctgccccaagccggtcacgagtgacacctttgcccctccggacccctttgggcatcccctgcaggggtggcgttccgaagccggcttcgacatggggatcctctcagactccgaccgtctggggggcttccaccgtctcctgcgaactccagtcatcccttaggtgcctcttcctcatccgctaacttcccgccaccggcagggaagcggggtcccggctcgcagccacacaccctctcaccgatgctgctcctggaccagtgcttcggtctctctcattgtctcgggtcggctgcggccagagccacccccagaatgctctccacctcgctcaccttggtcttttgcctcccttgctcgcaaactactacaactagttgtcacaggcgctccgtctaccggccgtttcttacaaggctggccattcctgagctcccaaatagactcgttgacagctccgctcagtcagggtcgctgccttttttttttttttttctcccctctctatctgttcgtttcacagacttcgcctactacttttcaaggcaggttttgtcgatttcgctgaatacctttcaataagcatctcagttacgcacggcgtccttcctctatgctcttctgttagtgttgatctaagtgtgatgggaagcatcactcggtaatttgggaggttttccgggtactcagtgtcgcagtatgtattaacttttttttttctggttcatgtctctttaatgagattaaaggctcctgtgtatgttttgggagtgagtaaagatagcacagtcctccgtgttgcccctcttcagggctccagccctttcaggtgtgttctaggagagtggggacggtcccacatggaggactgcagttgaaactagggctgaatcctggtggccaagtaatacccagtttccctcttgaaactacttatgggatgtccccacaactagaagccagccccacgggaggaacttgagacatagaatctggggacagtgtattgacttttaagtgaatgcccagtagtgtctttacccggtggtatttaatgatttgtagaaggtacagatcattttatagatgtgtgatttttactgatgtatgagtgtgtgtgtgtgtgggggggggcggggattataacgttcatttaaattccaagatatgacgtttaaggtggcaagttggataactaaatgaagtgttttatagagtaatttgttctgctacagtggttcctacttttaaagtgagggcctatagattcgccataccttcaagactccaaatgccattcctaacaaaataatgaaaccccaacaaatcagatcctatttatcttattttgtaattgtttgtgtatatgtgtaccctgacccagaagataaattgattatattcatattctgcgtaagtacctaatgtgctgattggagcacccttgattgtatttgtattactctagtacctactgtgctaactgattggagcatcctgatttgtgtcaccctagggttgttccaaataggaaacagttggctagtaaattaatgggtagtccacaaaagacttagtgaatgaattcctaaaatgcacatctttttgagtgcttgatttaacgtgtgtggtggtagaatgatcgtctagctgttgcttccttaccttcaagccccttctccattgaccttcagtatattgttactattatgtttaagatagattatattttgttacctagttcctgaactaaaggcagatgtataccttttgggttctgaaaatatcccctgaatacatagttaccttccatgccaggtagttcatggattcaagcattccaaagtgtccaagaactcattgtgctttactgagaacctcttcattcccctctctctcctctcttccctcctccccccgccccccattttattttatgtttatgtttgagacatggtctctcttcatagccctggttatcctagagctcagtatgtagaccagacgcctgcctctgcctcatgagtgctgggattaaaggtgtgggccatcacatttatcatgaaccctttcccctccattccctggccttttcttttgtttttttgagacagagttttggggttttttttgtttgtttgtttgtttggttggttggtttttgttttttgttttttttggtggtggttttttcatatcccaggctgtcctgtaactctctctgtagaccaggctgtccttgaattcacagagatctgcttgtctctgcctcctgaatgctgggattaaagatacgtgctgccactgtccagtatgaaactttttataattacccatctttttctagtcagttttcttctcttccttttcgctcttttttttaatgagaatatgattcgaagattcattatttcccatttggatttggtgacttgttaaaaatgcttacttattaaacagatggttttagagtgcaaggttgcaggctatccattcattttctagctaacagtttcctgagtgtatatactggtttagctccaccatagtgtgatacaaatacagttagggttctccagtctgttagcacattagtactgtagtagaatatgaaaataatcaattcatcccatgagaaagggtacgtacatgtatgcacacacacacacacacacacacacacacacacacagagaattacaaatttcttttaaaactgagttctgtaacttcaggttactattatgtcatcttgtattctataatcagttctcttggtgtttctgacaagcgtttattgagcactacttataaactgagcttgggctgagggttgtggaatacaagctctgtctaccagggtgtcagaatatcgacacacgtaggctgatggtgtgtgatcctttttctaaaataaatacataaaaattaaaacaagtacagaagttgctattaattcctcaagtaacaaagttataaatttttctaaggtgacagtttctcctacacatgttgacgcattggtccctgggtatgggtactgctatgtcgtactgaaagcaggtactaagcctttctgatgggtctcatgattcgtaccctgacttcattatcttatggtactggcagtatatgtaaaccgagtaaaacagagggaatatatgtttagctgtggattccagggaacacttgctttggggggaaaagataaagtttgagttgaagtatgaagtatgtttgtgtagaaatggagagaactgtaggtcagaagacagcatacatgtgtagtgaaagtacccactagactggactgctaaccctgcccagctagctcattagaaggctattcaagagaagtacttaaggctttacaaaaggaggctaaggcaggaggattgctgagagcccaaggccagccttgactacaaaaatgaaacgatgtctccaaaaaccaaagcaaagtcacagaagaaggaaaacctgggcgggtcacggtagcacacatatgtaatcctaatagtcagcaaggttcgtcagggacactgcatgtccaaggccagcagcacaaaggagtgggaatatgtgtgtgtgtgtgtgtgtgtgtgtgtatgtatatgtgtgtgtgtgtatgcatctgtgtgatctgtgtgtttgttagtatgggcatgtgcatgtctgtagaaagtagaggttgacattggatatctttccttgattactattatttgattatttatttatttatttatttatttatttatttatttatttatttatttttaaaattatttaccttcattttacatgtatcagggtttggcttgcacctaagtgcaccatgtgtgtgaaatgactgtggaggccagcagagggcactgtaactactggaacagaagttacaaatggctatgagctgctatgtgagccaaaccagtgtcttcagcaaggacaccgagtgcttttagcccttgcatccttacctactcctgctacccttaggtttttttgaaacagactctctcaccaaatctcatggacttggctgggctaattgagcagtggagtttaggaatccatctttttctgccctgcccagtccatcaatgagtgacagtcaccatgctggcctttactttttatatgcattgtgtgacacacagacgttccatacactggggacctagcaagtttacacaaagacatatcacaagtaaaacacaaagcggtctgtttccacatcgtgggaaagtgacagcagttttttggaagtggtagcccccacactgaatggggtggcatgctctagttgtaactcagaaccactaagtcaattccagtccttcccgaaagatgttaagaatcaacctttcaactttccagttctaaatgaagaacactctgctcttaacgacnnnnnnnnnnnnnnnnnnnncaatccacctgcttctgcctcccaagtgctgggattaaaggtgtgtgctaccactggcccagaccatttcataaatcacgttttttagggtaccattgtcattttttttctattttgtcattggttgataatgtctcactgtcccctaatgtataaattatttagcatagataagctatagatagatagatagatgataggcagaactatagtctatgtggatttggactcttcaaggcttccagcactcactgggactggtgtaaagtgtcttcccatggataaagagagactattcctttttttgttttgttttgttttgttttgttttgttttgttttcaatacaggtttcccctgtgtagcttctggcttcttacagaacttgatttgtagacctggctggccttgcactcagagatactgactgcctctacctccagtgctgggactaaaggcgtgcacagcacacctggcaagccggagaccattttctactgatgtaattatagacgaaatacagaattgggggagatgaaatacctgaacttcttgcaggaaaagcgggtcaaggggagcatcagaatgtcctagattgaaattatgaggcgtgtagaatttaagatggttctattctttacacaatggtgataaagactttgatgagaagaaatgaaatgcatgcttacatccagtaataagagaaatgtgtattattttctctgttttgtgcatcactgaaagtgaggctgtttgtttgtttgtttgttgcttgtttgttttgaggcagggcttatctacttagccctggctgtcctgggaactcattatatatactagactggcctcaaactcacagagtatctgtctgtctctgcctttccgagttctgagacttaaggcaaatgccatcactacacctggcctgaaaaagtgtttgataggctagtgagattgcttggtgggtaatggtactggctgctaagcctggcaacgtgtgttaagactctaggactcataatggaaagagagacacaactccannnnnnnnnnnnnnnnnnnnaagatgtcaacctcccacttttaagtttcttatcaaatattttcacttaagaaataattttgaagcctggtgtgctgacgtctgtctggcatcccagcccttaggggttggaggaggcaggaagataaagtacttcaaggccattctcaacaacataactagttccaggacagcctgggctataggaggccctgcctcaaaaacccaaacaacaaacaatgacaacaaaagaattttaaaaattaaaagttataaaaataacttaataggcacatttaatacatttaattttgaagctaggtggagataaagtatttctaaaatttaatctaaagtaatcctcatacattcagctacatcttttgtacagtttatatttcttttttaacagctattattgtgaaggggcttagagcatggttcctggcctatatgtagaggtcagaggacagcttctatgaaatggcgtcagttctctcctttcatatttgtgtgggctttgagaatttaactcaggttgtcaggattcacagcaagtgcttctactggcttctacatgctagactccagtgtgtgtgtgtgtgtgtgtgtgtgtgtgtgtatgtatatgtgtgtgtatgtgtgtgtatgtatgtgtgtgtgtgtgtatgtgtatatgtatgtgtgtgtgtgtgtgtgtgtgtgtgtgtatatattgagtgggcagaacttgaagccacagccctgcactgtctgcccttgtaccagataccaccatccactcctgtactcccaacacacagaacggtgagacgggaggatcagtatgagtttggagccagtctatgttacataatgagttataagtcagtgagaactatgcatttagaccttgtcttaataaaccactcactgagccacaaaactacattttagttaacatagtggtagatagattataaaagtaagcattttataaatctttttggggggagggggaattcgagacagggtttctctgtgtagccgtggctgtcctggaactcgctctgtagaccaggctggccttgcactcagcaatccacctgcttctgcctcccaagtgctgggattaaaggtgtgtgctaccactgcccagaccatttcataaatcacgttttttagggtacattgtcattttttttctattttgtcattggttataatgtctcactgtccctaatgtataaattatttagcatagataagctatagatagatagatagatgataggcagaactatagtcctatgtggatttggactcttcaaggcttccagcactcactgggactggtgtaaagnnnnnnnnnnnnnnnnnnnntcttccctctcccccccctctctctctctctctctctctctctctctctgtctctctctttctgttttgtttttgaaagagaagtctcattatgtatctctgactggctttgaactcactatgtagaccaggctggccatgaatgagatctgcctgtctgtgtctccctattgctgggattaaaggtgtgtgtcaccatgtctagcagtcagctttgtattatttaagcaatgtgatattctgtttaaaaatatgtaactaggttttgaataagtaatatatttcatttcaaaccatacacacacacacacacacgttttaaaagtcaccatgtactttcttcctagtgacatcatttgcttttgaccttgtttcagatggccgaacagaccccattttggatgatgttggtgaagccttccaacttatgggagttaatctgcatgaactagaagactatattcataatattgaacctgtcactttcccacatcaaattccttcatttcctgttagcaagaacaatgtccttcagtttcctcagcccggaagtaaagatgcagaggaaagaaaagactacattccggattaccttccccccatcgtgtcttctcaagaaggtatttgctatctaatctccctcctgtattaataacctggtctgttttgctttctacactcggccaatgcgcacgttctagaaatgcattctcagtgttttgaggtgatttaccagttattctaaccctttgacagacatgcttgccgctggtgtcaggcacagtcttggtgtgatcaagcttctttgggatgacgtatggatctgctctgtgacttgtagataggagagagcagagtgtgagcagtagaaccttctcagtacatgtattgtgcgagttaggaaacctctgaaacaagaagtaagcctcaggtatctcctgtcctcgctgaatgccatacacgctacagatgggggtaacaagtatattgtgagcactggctgatttgaagcctagctctggattttttgaggggaagggagctgtgagtagaaatcatgtcctcatggtcgtttagaacttttggttataaagagggtggagatgtagcttggttggtagtatacttccttgctctgtaggaagccttgagttcatccccaaacactgtataaagccaggcatgatgcctgtaaaaccaggatgctggaggtggaagaaggatcagaagttcaaggtcatcagaggctacatggtgagactgtctcaaagaaagaaaggaaagaaggcaggcagacaggtagctgacaggaaaggaggctggttggtttccagtgtaaacaaattcacagtcacagaaaatgaatggtagttgctaagaacaagggaagtaaagagtgtggaatttctgtttaatttgaacacagtttgagtttcagaagacaatacacattagaggttgatggtggtgatgcttatataagaatgtgagctgtactagtaaacagtagtgagaatggcctatgtatggaatcatacagtggctgtgttttgtggccgatcgcacacagcgtaaggtcttcaagccttgtcgctagtagttgtgtgccagcagtatcctcttgattttggtttggttttgtgtattgagacagggtctatcggtgtttctggctttcttggctcactatgtagaccatactggccttgaactcatgaagatccatcctttgcgttctgtactgctacgattaaaggcatgtgccaccatgcctggtgaattgttttccttaaggctgggtgatgtgacattttcatattccacatctatttcaccacctcttaagtagacactggttgcttctacctttagcttcttgtgagttaggccgttatgatcatatgaacattaagggtaagtctatatccatgccttcagttctcctgggtatgtagtcaaaatggacgtgctgtgtttggatgaaatacacaatacagaatcttgttagtttgagtgctgggcattgaactctgggctttgcacgtgttcctctacagaacaacacatccacctgtaaagttttgttttgtttcgtttttcgagacagggtttctctgtgtagccctggctgtcctggaactcactttgtagaccaggctggcctcgaactcagaaatccacctgcctctgcctcccaagtgctgggattaaaggcgtacaccaccacacctggcccacctgtaaagttttatttcattataattaattaattagttggttcatttattagtgtgtacacatgcacatcaagagtgctatatcacgtgtgttgtgtagacatcagaattggttttttgcttcaattgtgtgagtcctgggcatcagagctagggcatcaggctcccttacctgctgagccatcttttccactccaggatatagtgaagttttggggaaccataccactattttctaaagcaactggcatcatttaccttccaaccaggaagcgcccagggctgccacttcttgcagttcattttgtgtaatctcatgttctcctagctttgaagtattacttgcttgtttcatggactgggcttaaacttggagtaggttgttttacagtccatgtggccgtgctgcctatctgaaaactggacagacactggacctgagttgtagatcaatctgttctcctggattggtgggtttctgtgagaccctggctctaatgtgcagtgcgttccactgagaagtgctggagctgtggacatctctctgaagccctagtctccttggcagtaaccgtgctagatagagcaggtactgactgactgtaagttttcttcccttttcttgggaggtggtgatgtgtgagaacatggttagaactggggaggggcatgtgcatccctgtggaatctagaggaagatgccagcagatggtcttcagcatcggccttactgttctctcattgaaacatgactttcactgaacttacactttttggactgggctggctggccagtggtcctttttctgtaacccacagtactagtgttacaggtgtatatggccacacccagctgtttacagggtgctagatatccaaggttaggtttgtccaacatgtatgcttatgcactgagccagctgtctcccttttcaaaagttatcaacatgctctctcatctgaaccctttaagagacagacggtgctcaatagattagcagtttcccttcagaattaggtagagtaatactgacagaagccatgcgttagtgaatgtcttagttagggttttacttctgtgagcagacaccatgaccaaagcaacacttataaggacatttaattggggctggcttacagattcagaggttcagtccattatcatcaaggtaggaacatggcagcatccaggcaagcatggtgcaggaggagctcagagttctacgtcttcatctaaagactgctagcagaatactcacttccaagagctaggatgagggtcttaaagcccatggccacagtgacacacctactccaacaaggccacacctactaatagtgccacaccctaggccaagcatatacaaaccatcacagtgacacaggactgagaatagtgccacatccatggatgttcataaatggagtcacacatcgtttgtacagtcgtgcccattagaaggcttgctttctcctttttctgggcctcccaatgtcactgtcagactgtggagcatagacgtccctcagccattgccagcttttctttagtgactgctgagcactctgcccagtgccacctctgatccatctgtatttgtgacctttatttactgttagggaagtcttacttacatgcagttctctttaagccctttactgtttaatggcaatggttggtttggtttggtttgtttgtttagcttagaaacctacttttgttatgtctgctttaaacagaaattatttactttaaaaatataactagttcatgtaaaaccaatactaacaaaggctttaggcatggggccctggccaggtagtaactgggttgactggaactcccttgtctcctttagtcaggctgagtcaggtggtcctggaatgtctttcttgttggtgtggcttatacatcagtatatcttcatgaagatagtcctaagaatctatgatgtgtcctcttagacgtgaaaattaatccttgtatgtctgtgaagttcttattctcccagtgtacttactagtacacaaaaattgtaattgtgtcctgaaaatgaataaaaatcaaatggtgggaggaaacgaggaattagagatagaaatgaacagagtgataataatatatcagtggccgctacatggatggttttcaaaatgatgtgatcatgagttttatgtttgtgagtaaggtaggagccaagttaacaaccagactttatgcgtattgtcatgtgtatggcatgtgactgagatagactgacccctaccccctagttggtttgtttgttcgtttgaggaagggctctcacttatagcctatgtggacatggacttcactgtagcccagcctgccttcagactgatggcagccctgtctgttgctaggattccaggtgtctttctgggtgaaaagccttggccccctcacattcagtgtactcttcaaagctttctgagttgaactgttttgcactttttcttacctactacctaccagaccgcctatttaatagttaagctacttaataatgtaggaggggttcttttaagaattggacctgtgaggcataggatgtatgtggtggttagaacatttgctttgactgcagagccctgaagtcaatccccagtcctgaagaaaccaacaagaacaacagcaaataaataaaagccaagaaacttggactcaggaaattctggctttgttttcctttattttgatttgctgtaataaaattcttatgaagttatggttatcatatttaaatgctgtcaaataaatgttaaaatatcaattttatagtcaggagtggaaatacatgagaaaaaagaaacattggggtttcttctctggattatttgagacaatgattgatctgatctcccttgaattcttttgacaagccaggcatggtggcacatgcctttagtcctggcacttgggaggcagaagcaggctaatctctatgagtttgaggccaccctggtctataaaatgagttccaggagagtnnnnnnnnnnnnnnnnnnnnataaatatagccaggcatggtggcgcacgcctttagtcccagtgctaggaaggcagaggcaggcagatctaagtttaagttccaggacaactaagggaaatgcctatatgtttgtacaccacatgcatacccggtcctctatagaggccatccgatttcctggaactagagataggaacaattataagctgttatgtgggtgctgcagattgaaggttggcatggcttaacctctgagccatgctacagcatcatatgtactcactcatttgagatagcagggctctcttcactgcctaggctagtcttgaactcctggtctaagtgagcctcacaccaaaagtatacaggaataccttctctgacatccttgccaactcttccacattgtctgcctgataacagcctttcttaaccaatgtgagataatgctgtgcatttagtttatatttctcctaaagaccaggggtgttgcacatatttaaatgtgaatgttagccatccatgtgtcttagatgcccattgctcttgcactggtatctctagttcaagatcaggactacggggattttgccctctatgctatatcagtatttgttttatctttgccaacagttccagttcttagagataatgaagatcatagcattagaatattctgtgattactcattttcttatctcagagtacacatcatagtgatactgtcatccatgattactaaagcaggtaaaagagtttcgtattgctttgtttgcacacactgtcttatccgagttttgagaaagctctgtcatgaatacactggccaggtcttagagctactttcttgtattttaccaccttgttacccacgttttgataatctggttccctagtgtggttctctcaaggtttgagtgttgtggttctgatttgggtatttagtcacgttttgctttaaaaattgcaagtgtggttgctccttcggctcaccatggagtgatgaacatgttgtaacttgaacatatatgtcataagttaagatgcatcgatagtaagcccatagagctcctggagagaatgtcctgtttacccactgacccacgggagggcttcttgattttgcccagcatctgaaggagtattgaaaattcaaacctcaaagtacaatgtctcctttgtcatcatcgcaacttctaaaaatcgccgggcatggtggcgcacgcctttaatcccagcacttgggaggcagagacaggcggatttctgagttcgaggccagcctggtctacagagtgagttccaggacagccagggctatacagagaaactctgtcttggggaaaaaacaaaacaaaacaaaaaaaaaaccttctaaaaatcataaggtagctcaaggtcgttctccagctccacagtgcgccctcttctgttgcttttgtgtaacctttccatccctgttccccacccatgcttttatctggatctttccttttacttcgttagctttcccagtgctctcaaaagattagtgtctatgtattactttaagttataatttggatttgagggaaacgaaatatgtgcccaaactataagtaccagtagttttttttttaacttactgtacaataaaaacgaaggttatttgtttttttaagtatgggggtgagatggttcagttgagagggaggactcctggggtgctgtacccccaatacctgtagacctccttgcagccatcagaatgaccccaggaaggagcacaggtgggacatgttcatggataaaacttggttatagagttgttctcgagaattcagtataccggagccaaggtctcacagctgggagactgtgggagatcaaatatgaaaacacctagcccttaaagaaattggccagaggtcgccctaaagcttacagtaaaggaatattttaatataccttttatgctgattttttaaaaaaaataggagtccgatagagttcaaagttatgcagcagtaataagccaaggtttgggatcttgtctcaggacagaggaggctgtttgttaggagcagctgatgcacttgtccaacacatgggtggagatctggactactgactgaatgtctttcatgtgccagacagtcactgtgacccaggctggggacagaggctctctctctcagctcttgatttagtggaagtgtttaaagatggcccagcttctattgtaggatagagggctcgtattctgtctcagctgcttatatttgagtgtgtgtgtgtgtatgtgtgtgtgtgtgtgtgtatttttgaggtggggtctagctatgcaccccaggctagcctgaactttcagtctttctcctctatctcctgagtactaggacccaggcagatgccactgtgtctggctctttcagttcttaagcagaaagtgctgaaaatctaaaatcacttctgttctgaagaagatcaagcattcactgtgagggttttggattggggtttgaaggtatccacgtgcatctgcacctggtactgcagcatctgcagctactgtgtggcatctgctgcaccggctgctagcttggcatttgctgcaacaggacagtgctaagccatcggtattccactctcagatgttagggcctgggagatggaaataattatgatacaagtggaaaatttattagatctgataaaatggggggataaaacttggcattataattgaatgacataaattatcttactacaagccttatatgtgcttttctgaaaacaggatcacatttaccattatttctcctgagaacctgtactgggtatagcgattggcataacacatggcttcaaaagtatgatgtagtaagtatgtctgtaatgatatcttcccctgagtctttctagactgaatataacaacagtgtataaagtgcagcacacagtagggctgagcttgcttctgcttaaaggatccttctgcattctgcctagggatcgtctactttatctccccacagaaatttctttgcacttccacttacgcagaccagagtgtaactcggtcttggaaaggtagtactataagaaaaatgaagctacgtgagaatgtatgttttaaattatttatgtacttttatttgatgtgcgttggggttttgcgtgcatgtatgtctgtgttagggtgtcggatcttggatttacagacagttgtgagctgccatgtggatgctgggccttgaatccagttcctctggaagagcagccagcgttctttactagggagccatctcttcagccccatgagaatgtatttttactttttgtatttgttttccattggtttgtaataatggactttatttttagtaattgtttagtaactgtttcttttttagtttggtaatttagttttttttttttttgaaacttaaggatatattgaagctatttttatttacaaatatttaagtatagttatttgcgtcttatttgcctctcctcttgtccctgctgtactctgtctcagtgtctctctctctctctctctccctccctgccaccttatctctgctcactggctctatgaggaattttgttgtgatgctaattaacttttggtaattgggtcattgttcattgtagtgtcctgtgtgtaatgtgtacactttcctcttatttcctcagacttggtctcaactagcagtttttaataaaatgttatatagtcacaatataaagtttacatatacattgatcttgctggtaccgtctttcgcccttttatcctcactagagacatcatgctctgcagaggaaggaaatggtccttgtttactgtggaggtgactgtagttcagtaggtggcaccctttccttagtatcagtgagtgtgcaatcacatgcaagactgttttaagtcctgagtaggaacagtgtcagctccatcggcaagacttgctttagactctccttgccgttttcccatctagctctggagctttcctaggatgctaggaaaactgtaaactgttggacttgtgtctgccttgaggaagcatctgcatctagaacagtctgttggcacagtcccgtgttgtcctttcagaaaccagtgtcctttccaaagtttgaaatcatcttttcatcttcttttctgtctataatttatttttaaacatcatcatccaaggtctatcaaaagacactttagaaattaactaattcctcccattctaacacagcaggttaccgttaccttatctatagcagatccctgccttcctgctttgtggaaagagtatcttggtgattagagtacggtatatcctcctgtctccagctttgtattattgttattgttattattatatgtgacagtgttcacttgctcccgtgcatttgtttattctctgtacatttgaagcagtgcacgctaatttccttagctattttattgctgttggccattgtccttatgttaagacggtgcagctgcacagcaaagctccctctgcacactttctttcctcctaacaaatcctcaggagtttttaggtcaaaggtttatgggttttgacacatcttacgtactggtttccaaaagaagtgtgtcaatttacaaagccatgatgagtttgtgattggatcacgtttcaacagtctcaacaactggatttcaaagtccccctcccccatttcctgcgccccccccccccagaagcgtaaattaaccatctttggagactcagtcatttgtttttcagtcatttacttagaatgaatttataagcattgacaagaattactaggaactaccaaaaccattaccacccctgcccctaactagagttatggccactgaggtgattgtgatgtcctctgtctgagtctctctgtatttctgtaagtgtgcataagggggtgtgtgcagtgcccattttagagtagcttagtgtcacatatgtcacaaatatgacacacatattatggtgtcacataagtgtcccgtgtaactagccacacctactctgtgctggccgtccactgtttgctctttgctggacagttgggaggcttcgcttgatagaagtgtctaaagtgggctggagtgatgtggtttgagtgggtcagtggggctgactggctgtgtagatgggagattgtgtttgagatatgcactgttagggacttaggcaagtctgttgggtagttctgtctggaatgcttactaagtaaatatttgtgcatatatacctacagaaaatagctactcatatttaaagtaaaggttgcgaggtctctgagataaaggtaaagaatgctgttttgtgttgctggaaagtctgcaaccatcattgccaatggccccatggcgggccatccctgtgttaaacagtcccaatcccaatgacacagggtaatccctttcatcccgtcacctcagtggagccttcaaacatagtaggtgttttatttgcattttttctcttctttccttttccctttttcttacgaggtcccgtgtgtcccaggctggccttgaactcactgaggatgagtttgagctactgcctctccctctcaagttcctagattacagacaggctcccctcaggcagcctcagagctcttttgtctttagcattaagcatagcttgcgcaaccaggatttgaacccttctaaccctcgacacagacacactgttaggctccatggactgcagtttttgttttcagtttcagttggagaagttttgatgtttgtaatgattagaattttatggtttgtatttattgcttagaggccatagaagaataaggaaagatttacttcttgtggctttggggttattttgtaacttgaaggcagtatgagatttgagagattacattttcccaaatcttcaaatattttccattattttcataaagtattgttcagtaactacttccaaatattccttaaaatgtaaaatatcaatataatggaaaattaattaagttgcttacagaaagatgaaccagtagttagatacattatcattctctatctttattactttggatggaagactattttttttctccttttttttttaaagatttatttatttattatatgtaagtacactgtagctgtcttcagacacgccagaagagggcgtcagatctcattacagatggttgtgatctaccatgtggttgctgggatttgaactcaggaccttcggaagagaagagcagtcagtgctcttaccggctgagccatctctccagccctggatcggagactattgtaattccacagtgtgttgaaaaagaatggagtctgggcgttctggtgttgcccttcatctttgtcagtgggataggaacagcgaagtccagaagcccaggctggccagggtcatagatggataccttgtttcagaaacaaaagcaaaaagcaaaaacaaatcagaaagtctgttttcttttgttcaatacagctgaaatgcttaaatattttatttttctatgtatattaaagagataaagttaatgtgtttcacagttattagaaaaataagtagggctctaaagagatgggtcagcagtccagagtaagtgtacttcagcgagctggaggccagttccccgctcgcagccttctgtaactacagggtatttgaagccgcctctgtaccctaggacacctacacccatgtgtgcatactcacacacagacacacatattgaaaggcaaaatatgtcttttttaaaaataaaagacaaatcaaagtcaatgcagaggtggtgtttcaggtttaatggtgatggtggtgtggtggcagggcagactaagagcgcaaatgatagcatcctacgggaaattttatttgtagaaacacacaccattaaacaagaaagcttttatcatacaagaagaatcttggaacaaaacagattttcttactttgaaaagatatattacagcatgaaaaatattttatataacagtatcggtaatggtaaaacgtattgatttttttttaaaaacaattttatgtatgtgtgtgtatgtgtatatatatatgtatgtatgtgtgtgtatgtatgtatgtgtgtgtatatatatgtacgtgtgtgtttctgtatgtatgtgtgtatatgtgtgtgtgtgtatatatatatatatgtgtgtgtgtgtatgtatgtgtatgtatgtatgtgtgtgtatgtatgtatgtgggtgtatgtatgtgtgtatgtatatatgtgtgtgtgtatgtatgtgtgtatgtatgtatgtgtgtatatatatgtgtgtgtgtgtgtgtatgtgtgtgtatgtatgtgtgtgtatatatatatatatatatatatatatgtgtgtgtgtgtgtgtgtgtgtgtgtgtgtgtgtgtatgtgtgctcaggtacactttgaggcctgaagagggccttgtctcccttggagctgaagttacaggccttcctaagctgctttataagggggatgagaactgagctgagtcctggaagagcagcaatcactgaaaatctctacagatttctagtaaaatctctaataaaattgttttcattatccttcatatatacttctgtaagttatacacaaaatgagtttacaaatataaagattgcatcgaatccatttgctaaatggtagcaagggctgtgtttcttaacacagtgaagggttaaagtgagaaaacgcatacttgtcagatctaatggcattattccattttaacacctctcttcagagcacagccctaattatggctgacagatacaattgggaatagttagaaaaaatggtagttctggaccagtcatcagcggggcgaacactcaggaagtcccagcaccgtggtgaaggagaaacgctcatctctcatttcctttcatgcacagtgtgttcggattaactttaaaggagcatgagaggtgggtcagaagattgtgtctacaattgagtactacctgtgtgtggagcccagctcagcaggcagccagtcatcagctaacaagccttgccaggccccgtgacaattcccagatatcctgttgcaaattaaatatgaaacagggatagacttagcttcgcaattgaaggatttcttcacattcagcttcaaatgcagttgttggtgcatgcatttttattaaagctggctttgtggagaagggagtgatagcttgactgtctatgtggtgttatagaaaatgctgtgggaaaacgaatgccgtgcagttctgtgcctttccgcgtctacatggtgcatacagtaactctccttgtaaataaacatcacagggtcggcaagcccacgcactaaccatgcagcctgttcgtgaacttgtttgcagtgtagaaatgctaaggttttcaacaaatgtttcatggcaggtgtcttctgaagctttgctttttcaagtttattttcaatgcttttgtagtaacagaaatagaacgtggtgaattagattagacattgagggacagaaggccaggttgtggatctgaagagatgtgactgtaaaagcagcgtatgtgcccgactgaggtgtcatgagcaccattgagggtttctgcacactaagcctttatgtccttattctatttgtagtgacttttccccatgtaaaaaagtcaatgaaactcaccctcttcactcgcagagctgggagactttcttgaatctactactgcacttgaagtagaattccatcactccttaagatgagggactgtacataaggctgcttgctgcagggccgtgctctacctctgagcaagatctccagccctcttttcttttcttttcttttcttttcttttcttttcttttcttttcttttcttttcttttcttctcttctcttctcttctcttctcttctcttctcttctctttctttctttctttctttctccctttctttcttcccctcccctctttctttctctctctctctctctctctctctctctctctctctctccttcctcccttcctcccctcctctcccctctttctttctctctctctctccttcctcccttcctcccttcttcccctcccctcccctcctctctctcttctctctctctctctctctctctctctctctctctctctctctctctcttgtatgtaaatgtgggcacatacatgccacgacacacgtatagaggcagagcagagcctcgggcgtcagtgctcgctttctacctatttgagactgggtcttttattgttccctgctgggaatgggagacatgcctccagccatcccctggctgggtctcttatcttgatgtaggagcaatgacattagatgcccctactgcatacatccagtttttacatgggtttctgggattcggtgcctcatgcttgtatacctactgagccatctgcatagctgcattttgttttgagataggttctaacttactaacttaccaagactggccttaacctcactctatagctcaggcaggtcttacatttataaccctctagcatagtctcctgagaagctacaattactgacctgtgccagcaagcctggctcacacaaattcatttattcttcataataaccacaaagtaaatgataacgtctgtgataacaagtgctaattgtcaacttcatggtgtctggaatcacctcagcagtggctctttgggcatatacatggaagattaccttgcttgtgctaattgatatgggaagggcccccttaatggtaggtaggaactgtttcttggattgacagatgcggagggagaaaactaaggaaggatgtggcaggatatcatcttcttgactggattcgatgtggccaggttccccagctgtttgccactgtggactgtgcttagaactttgagctaaaagtaagctcttgtactcttcagtttctttggtcggagtatttatcacagcaactgtaaaagaaactacgagagtttcatttaatgggtaatcaaatgagacataggataataacaacttttaagatcagaccttagtaactggggagagtctgaggtttgaattgaggcagttgaactctaaagaactctttctcagtttctggcttttttctttctgtagttagaatatgtttctatgtgtgctgttccatgaatggagtgtatgtaatggatcagggattacaaggatagttaagatccattgagggaacagctataggctttaccaagtgtggagccccatcccaattgcaccactcttgctagctcagggtaagtcagtcggcagtaactccgtgcttttctgtcctcagcgaggtgggggtatgaaacacacaccttctggttggcctttcaggggggaggaggtgctgctctcactttattccgtactggtagaaaattactcctctcagtctgtggaaggcaaaatccacagcatacagaaagctaagtctgatgctaacacaccagccctgcagtaaatttgctaatacttagagataaaagtttaacttggaggttaaattcctaatttccccagactgctatgtcagtgatagtgggctcagtgccttagggaagtttgtctgtgttcaaactgtggtaggctgtggtttttctctcacaaacatagggttatgggttggaagctgggttcccagtgcggggtaagtgagaagtccttagatcatttagggcactgccctcagaagggattaagttagctctcctgggatcccaggttcttttgagggagttgtttggaatggggctggctactgaatccaaccatggctttctatttcaagatgtaatctgccttctgggcttggtgttccacactatatcccaccacccagaaagatggggcagaagaggaagaggattttgaggccagcctaggctgcaaagtgagatgctatctcagaacataaagataaaatagctttctcgcacatgggctcctgccactgtgctgtcaggatcctcagcagagtcagaacaggtgtccccagagtcctcaccaccccatgcctggagctgcaactttgagcctctgcaattgtgaaccaatagcctcttctctttataaagtacctgcctcggatactttgtaaagcctttctgccttagatactttgttgtaggatctaaggaggggtgcttaatattgtccattgtgcccacacaccacctttgttgttgtccttgttctctgattttatgtatcaagaagtattgcaaacacacaaaatatagaagtattttgtccagaaacagagaaatccccacttttatgtttacaggttcatgtgtggaacaaacaagaaataataagcatataataaataaattatatggtatatttacaataaatgctaaaggacatttagtagaacattgtagatgggaattgaaaacgctaggtggatagaagaagcgttggttaaaattacattggggctagaaagatagctcagtggttaacagttcttactgttgcaaaggacctgggttcagttcccagtacccatagggtgggtcacaatcattcatatcaatcaataattaaccactaatttcagcagatcagatacgttcctttgacctctaagagcaccaagcacccgtgttgtgcacatatatacatacacagaggcgtatgcatccatagaggcaaaacacatacatttaaaacaaaaataaatcaagaaattttcaattatgtaaagtcatggcatattgtgaaaggttcattgagcatacatttaaaagagcaattcaaggcatctggggaagagacagcacatagaaggaactctaatgcaaggccccaaaagggggcatgccttgggtgtcgggggagtacacaggggtcaataagactgggacatgatggatggtgacagtgttaggagacaggtccagaggaagtacaaaggtcctcactagaggccaggtggatatctgactcatcctcactgagagagatggaagcactttaatatttttaaaattccaaatacaaaagtaaagggattagactagatagcttcctatatctgtccgccagtcctgctcactatacgctcattcatttcttctctttccgggctgccttgaagaaagcgtccagcctcatgttatctcttcataattttttgttttgttttaagctagggcctaatggagcacagcttggcctctagcctgctgtctcccaagtcctggggttgcaggtgtgtactagcatgtccagtcgtcattcatcagaagcatggaagcatataactctacaggatgagaactgtgttagcagtcgtacagtcctgttgccatgtgcttaggattaactccccacggatggcatcaggtaactgataagtggggtaagcatgggcgtatataactgtctgttccagtcaaactcttaggatctctccgttggaatgagtttgtttcttttcctctcttcctatcccctcccttttatctctttcctctttatgtctgcatatttgctgcagggtctggattgtttggcctccacgggtctttccactctgcagttcacttacagtgccccaacaggtgtgttttacatggtcttctgtatcctgtacattcatggtggttccaaaaccttcaaatgtcaggttcaatggcttagtggaggctgttgtagattgggagtgtgtgatttcagcagacatccatccagtcatgaagtcagtacaggttgtaaataatggcagctcacgcctttattagctgctgcttctctaaagagaatgtcctttcatgtactctggggacttggtagtagtatatttacaaaagaactaatgagtggcttttctgttccatcatcgttactataataaaatgattccttggcttattgtaggtaaccaccgactaactagttgtgcccatttttaaatcatcctgatccatagacttaaagacatttgatggtcatggtggcacactcaggagtcagagggagatagttctcttgagtttgagactaatctggtctacagggggagttccagtacaactggggctccatagagaaaccctgtctcaagaaaccagaaaaagaaaaaagaaaaagaaaagaaatttgatgagtgtcagtctagcacagctgttgctgtccaccgagtgctgagatagccctgactctgccgtgtgcgactagtgctctgcaggagctgcctcccactctcttacaaagtcttgctggctcactgacgactactgtcaagacttcaggaagttgtgggctggttgtaaagcacagtccttgttaaaagtcatgtaaacttaaataagttatactaaaagcaagatgcccacaccccatcgcctctcggttcttttctggttaagcttactgtactgtgtgagagagtgcttcatggctgtctgttctcagctgttctcagctgcatagcttactgccaggttcaaactggccacggtgggaggcttcgcggcccagaaggccgcaagtgcgaacacatcacggtctgctttattcttctgctgatttgaaacagtgatggtgaaactatggaacctgcagatggggctccaaaatgagtcctgtctgtagctgtttgattataagtcatgaggaatatcctttcagcgttctgcagccaaagaactcgtccctgttattggcgttaagtgcagttctggcacgcgccagatttattttgcttcagcctcaagagatcagcagagctcctggttctgtggaatgggcttgattggagcctacctgtgtccatttatttatgtattgtctgtgcagccttgatgctgcctcggcagacaggactaggtgtgacagatagtgagtgtgccacaagcctatgtgtttaccatctggacctctcagtgtaaccaacttctgtgtgcacattcattcttcacttgcaagcctgagttggttttactgatacataattttggcaaatatcagcaaaaatattctgtaataattgtacatacaggatttatgacaactatatatttaaattatgttctatgaatcctttatgtcattaaaattgaaacatagcacacacgtgcatagcgccatgtcccaaagcagttgctaaacactgaccagcacaccaccctgtccacttgagtggacatcatctagtaagcggatccagtaactgatgccactgctaaagtgactctgccctctgagtggggaactgggaattgagtgagcagaaaaaaccatgagttttaaaaggaacatgtctaacaatagactcagcagggatagctagaagctcaaagaaattcttgtcacccagtgagtattgcaaatatttgtagtttgtatctttaaggatttttaattttatgtgtatgagtgtcttgcctacttatatgtactacatacatgcctggttcctgcagaggttagaagagggcatcacattccctggaactagagttagcaatggttatgagcctccagatgggtactagaaaccaaactcaggtcctcttcaagagcagcaagtgcttttaacctatgagacatctctctattcccataatttgtattttaaatttgctattgatttctggaaaactatgaccccctaagctgccacagtagataattagaggaaagcatttggcccagatggttaattctgtgtattcactcttaggctggacacagaaagatgcacatgtccgattaattcagttagtttttactgaactctcaagtctgtagcacactcttcatagtactgacaggttgtacccttctggcctgaacctacttgacatcttgtatgttagtgaagaggacagagtggagcgtcgctcatttgttatgacatgagtgactttctgaatcagatctagtctctaaatactagaaaaatgtttcctcagcagaacagctatggacacacagcacacttcagttattctacattttcaatatttcttctggaagtttcttacagctttcatagtcaacataagagtttattagtctttctgtgttttgtaggatatctgtctttccagctatctgtctgtccgcccgtccatccatccatccatccatccatccatccatccatctatcttaatctccttggccaatttcaagtcatcagtagaatgctgttgattgtaaaagagaacaaggagccaggcgtggtggcgcacacctttaatcccagcacttgggaggcagaggcaggcggatttctgagttcgaggccagtctggtctacaaagtgagttccaggacagccagggctatacagagaaaccctgtctcgaaaaaccaaaagagagagagagagagagagagcgaggactttcactgacacggagtccccagtgcaccagggttggggtggaagagccacagtttgtgtgactgagctgtcccagcacacacacccctggtgatcttgaggaaggttaccgtctactcaggttttcacagagtgatttagagtggaaataaaatgctttccatcaaaggatatgtggcctgagacctttgtaaagtgacaagtctaaatgtaatcacattttagttggcacatattcattatatatagtactcagtttcatagggacattgtcattcaaaggtaataatacacttttgaacccctccctcctctagacaaagtcacttcttccttgtcatgtatgcttgtgtgactaggttttgaggaatatctaatcatacagttaagatcagaagactgaggaaccattttgaactcttctgtcataggagggaagatagtgccctatattcaaaatattattctaacaacattgtcatcccatttaaaaaaaaaacaacacgcaagcacagtgcacttggcagtgttctgagttccctttggaattctgtttaattggagtccattcttctctgggttgtaagaatagttagtgcaggcaagcactctgtgcctaaggtggtagaatttgaagcatctttctggggcctgacatgagtgactttgaagggaaaggcaaacctcaaaaccaaggaagttcaaatcaggatcttcaccgctgttcactcgtttctgaaacctctcctgccgcaggcctgagctttccgcattacccagctggagctcggttccgccaggtgctgcgtgtgcccagtagcaaggtccctggaactggaggcagacttggcaagatgccggtgggatcgcaatggctactcccagagtggaaggcttggtgccggccagtctttggaacattcaagtagacactggatagtgtattatgtggtggactgtcacaagactctactcagacctgctctcgagttttaaaaagcattttgattttatgttacctgaattcatcatcctatttgtaggtatttcatgaaagggcaattgtattttgattggagggaaatcatgacttttttctttcacacgggtataaatatgtaagcagagctcgtagctttctctttgcttgttaatgtgactatttacccaagtatattaagtgatgttttaaggtcaagagagaaagtgataggagcgcactggagccattgggagaccactgctcacttggcctgcctggggagctggggagccgattgccagctctgtcagagccggggctttgcgcaggccttggtttggttttctctactgacctgagggatttctatgaaaccttatgtcagttgaactacttaggtagggaaggtaagagaggaagagtggaacttgaggtttacgaggtaggcagattacaaatagcatcggatgtcttccgtagcaggttaacttgagctctacttaattacagattgaaatatgaaatcattttactttcttatataccatggtaaaagagttacacttttgagagtgactggccatggtcttgagggcttttcctagagagttttgacagtagcataatcaaatcctcatctttgtccatatctactatttacaagctgtcagagaaatgggtgacatggccagtggcttatagcaggctggtgtcatttagacttgtgtgattttaattctctgcctggcgtttggtatgttggaatatttcaggttctgtaatagtctgtagttaccggcacaggcattacttatacttggacacactttggttttcaccagctctgatcctctgatcagttagaagattccagaccttcttattctactgaacagagaaaaccctaaccttgattcttgagttaatgtttcatggtgaatgtttcataagtaagaatttaccttagagtattaatatataaaatacagtagatgttaattgttttatatctttaattttaaaaatgtatctttagaggagaggaggtagctggaggtgagtagacaacctccaggagtctctcctttccttctgccatgtgggttcagggattaaacactggtcagcaagcttggtggcaagcatctctacccactgagccatcttgttaggccttttcttttaatatctttttacttctacataatttttttatcatgagatctactggcgcattatagaaatctgtatgttgtgtttttgtttttgatcatcaaagatagtacttttcatatattttaatacaaattggggtatgaagtcttatgagaaagtccctttggccttatttacctgagtcccattctcttcatactagagtgaaatagagactgagtgccctgggagtctattcttttgttgttctttataataccaataacaacatactgtttctcttctttgtgtgcaataaggactgacccagaatggccaggcccttagagcccatctgctctaagaaatgcagcatctcggattggggtttgggctcagttgatacagtacttatttggcatgcgcagcgttctgcattcagaacctggcacatcacagaagctggtcatggtggacatacctgtaatcccagcactcagaaagtagactgaagaacaccagaagttcaaggtcttggattcataacgaattctagttcatgatcagaccaaaaaattaaaagtcacaaaagtgttgctataagccaaaaaaattagcacctcataatttgttttaataaagctttgtctttggtgtttttagacagtgcttaatttcaaaggcttgatatcacattccaagtaggtgtggcacttgatactgactctgtgaatgggcttggcttgtgagtgtcaactctaggtgggaatggtttttttctaagtactgaatgctttccatgttactctctggatattgcttcaagcatgtctgtgcagtcctcacagctgctctgaggttttatcattatcctcattgtaggcgaaaaccaaaagctaaaaccccaagcagtggtacaggggagccacctgactgtctgagagcataggagatctatgtacaaagccaggcttgtacaacagcctgggattttgtttcttaattttgcagtgaataagtatgtgtaagacaactgggagagtacagagactctaagagtcagactgtctccccttgtttaatttagataacctgagtgttggtttagaggacaccaaagtcagtttgcttgcttcttcatttttagctcgcttttcacatgctgtctttcaactagggcttttctgggattcgttaccaagaattgtaacctaccctctgtacatggaaatgtgcccttcatccctgctgtgtggtttctggattccaggagagcaacactgacatccagaatcctctgacagggacgctctcttcagctcattttaggatggatgagaaaagtaatgatgctgtctatctgtccaacacccttggctcctgaaatcagggctcagctgaatcgctcactgttttctggtctgatcacatttctttcatccctacttccctgtctttgcttgtcattggtcatccattgatccatcctccctccctctctctcttctcccctcccctatccccctccnnnnnnnnnnnnnnnnnnnntcccctatccccctcccctcccctcttctcttctcttctcttctcttctcttctcttctcttctcttctcttctcttctcttctcttctcttctcttctcttctctttctttgacagtttttgtctgtatagccctagctgacctaggatttgctctgtaggccaggctagccttgagcttagagatctgcttgcctctgcctcctgagtactgggattaaaggtgtgtgtcactatgcctagctcatcttcttttttccttatatattaacttgtgtgtgtgtacatgagtgtggtgcccacagaagccagccctgtagagctagagttagaggcagttatgagccacgtgctgtggctgatcagaattgaattcaggtcctctgcaagagtagtgtgtgttcttttgtggtcttaaccactgcacaatctcttcagttacttgtctttgctcttgatggaatgactttaaactatcctcatttgacaaggaaacaggaaggaattggttgctaactgtacagtattgtgtaccttggtgaatgatgatggcactttattctcttcatttagggacttttggttttttacctccctccaccagggtgtactcatctatttgtttgtttgtttgttttttctattttattgactgtttcacacctagcacttataacacagtgcttaatatatacaaaatgtcttttgggcaagttactcttctttagagaatgtattatttcatgataattattatgcttagtgacatagcatttctggcttttaaactgtatgttatatattttatcttatgtgtgtgaatgttttgtatgcactccatgggtgtgcttgatagcctccgaggacagaagacgttgtcaggtcccatggaactggaattactaattatgagccccatgttagtgctggcaactaaagccaggtcctctgcaagagcagcaaggacttctcagctcccagcaccgccccagcccctgggagtcttcctgttttatgtcttccaaaccatggaacaataaatgtgattactcatggtcactgtagagactggacttcactctaacattttctttaaagcaatgattcttgaagttttaaatgattttataatctatgatatgtttaaaaaaaccaaacatgagtttactatctttcaaagtaattggtaattcaggaacaggagacggcggtctagtcttcccatttccagctctgtgcttaggtggtgcagtgaatgcgcactgttgccctaggaattttaaacgtagtggaaagcacaccggcttaatgtcttgccagacaatgtgtgctgctcattcattcaccatggttttagcatcattattggatgatgtcatatcttttctaaactagagttttagtcattggtatgattaaaaagtaagaggtacgtaaaatctactgaaaaacaggaaacaggagtggctggtccaattagcaacgttttaaatatttgcacatatgtcgtttaaacagtgatcaactcttattacatgaattctgaattgttagtctataactacttaaccaatagaatcacttttgtggcctgagacagtaagggcactgtgaactgaaaagcttcactaccacttggtttcctcagtaagtggtaatagcatcctcaacaggaacatttaggtgttggggagcaaaatgagatcttccataacaaacataagggtttaggctgagattgctgtcagtcatagattctgggagtctttgaactatgcatatttattaagccttagtttaagaaaatctatgtttagtgagctttatttaagaagttctactttagaactgttttagaattctttacagtagcaaacatagaagccatataactctcaagattccaccctttagaaaggattttttcctttgttgaggacccaggttttatgtaccaggtagacaatgccagattcagtgtttgttcatcgagatagatagggtctctctatgacaccctggctgtcctggagctctctgggcagaccaagctggcctcaaacacacagagatcctcctgcctttgcctctgctgggattagaggcctgtgccactatgcctggcagatttagtattttaaatgtgcagggtcatacacacacacacacacacacacacacacacacacacacacacacacgcacacagtctgtcttgaaaccagccttacagctttagggccaaggccaaggctctcctgtgggttacattgctcccaagtcataaccactgctgccctccaaaagtaacagagtagctacacttgctgtttaaagctttatgtgctcttacataaagtggtttttgttgcctgtcccaatagttcttaagtgtgtagctctcatattgcttagtgtggaggttagcagaatggtcagtcttgtgcattctgaactagtaagctcaaacatccttaatgggaataaagcctgccagcctttgtctatgtgggtctcagctgcaggccctttagcagcaggagccttgtcatatttggtctgtgttcccagacagcaccatggacatgggcttcttgctatgtcaggatgctgcaggctaactgtgtgtgctcctgacttagatctacagttgtccacttctcagaacagtcttggcttttataaagcttctatggggagagatgtctgtgttgggggttattcttttcctttaccacctcatagacaccccagtactgcctataaagatccactgtttctgtaagaagtcaggtgtctttggagtgatatgtcatgggtctaaatattgatattgttttgtgagatgggtatctttcttttttaatttcaagactgtatttggttttcagcagttcaactgtggtttcatccttttatgcttgagaagtgtactttttcttctctagtctgtcatctttgtgagacctcagctaaacatatgttaaacttcactttttaagatttatttttaactatgtatatgtgtctgtgcagccatatgtgcacatgagtgcaggtgcctgtgcaggccaacggcttcagatctcctgaacctggagtcatggacagttgtgaggcacacgatgtggtttctagaaccaaacccagcttctctgcaagagcagtacacactcttacctgttgaagcgcctcggcagccccagggttagactcgtgctttgtttgctttgagacagcgagaacctgagacaggagaacctcttttggttgtctgagttggactctgactgccttttttctttggcaggctttgttagcatttctccctataactactaagtcctagttatgctcctggcattaatgttagtctatagaagagtctgagttttgttgcactttactgatgagtgttgattttgcttctgttggttgcttatggcagcaggaagttagtttggctgaactcagactggcagctgtgcgtcccaggctgagcagcagctgaagtctgttgcttcggcgtcactgtgggtgctcctcttactacttctgaggtaggttatcataatgtagtgcagactggccttctggccatggttgtcagatctcagctcctggactttggggttgcaggtgtgtcacacctggcgcttgcttgggatcctgcctttttagccttgattgacatatacctggtatggaataaatcccatgtgtttcaagtctgcattttgataagttttgagatgtgtcagtacttctgaaaccattttcacagacaaatgagaaaatatccacctccccaggagtctcatctcccctctccccagttctgtctccagataatcgctggcctgtttccatcatagaaaatgtcttttgtttcttcccactcactcaattatattgagattcatccatatcattgctaatttctatactccggcctttattgaggagtagcaattatatatatatatatatatatatatatatatatatacacacatacatatacacacaccatagcttatttacccactcacctgttaatggacattccagttgtctcttgttttacagtttctgataaagttacagtgagcatttgtgctttcatttatctcagataaatacccagggaaggctgagagagataaactttttaatctctgatcttgggatcagatattgtctatgaaaatgcagagagctctgcaggcccacttcttagcttacgagtaggccagctctttaggctcattgtagctttgccatgaggcccttgtctttccacatcagtctttggtcaggctcctgacttgtgcagaaaagactgtagggagtttggggactgcatagagtctctaggtcactttggaggaattcctgttgtggcactgttgaaccttccagttcatgagcatgatttagttcttccttcctaactcacttggttttccttagcattgtgcagtagttttcagtgtgcctcttatgcataatttattaacttacccatacatattttatatttaatgctacatgacctgggttttatttaattatgtacttggcttaagagccaatttaagttcaaaaagcaaaattgatctgaacatacagaaagtttggcatgcccactgtatctccatccacagcccctgccacggacacactaactgagggtgtactgaggagcacactgtcagcttgctattgctccagctctgctctttacttagggctcacccttgctctgcaggttttctattttgacaaaacataataccaccataattgtttaaatcagaatttatatgtagaggccaggatgccccactcctggtccactctctcccactccccgtctatctcctttgtagagtttggttgtcagtctcaggctccatcctgagtccacaggagagtagcagtgcaggtttttctttatgtccagggacttcacaaagcccaggtcagagtctgcccttagacggaaggcccaaaagatgagcttctcctcagtgctgacctctcttctcaactgtaactgtctttcaagtctgcttgctcttccttgctttctagaaccttcacatacttgttttcattgttttatccaaagttcctatctattacccaaggaaggctctctctgatattaaatttacactttgtagaaactagactctgacaagttttcagacttgtgtttcaggaccctacctactctggtcctgggccactgatggccactggtttaagccttgtttctaagcctgttcccctggcatataacttacccttttagctctttaaataatcaaaggagtttgttgtttgttttccctttctggaagtctaaagagttcatcagaatatcttggtatcagttgctcagagctgcactgtgtggcagtgtcctttagggataggtggttcaccttgcatcggattgactgctcttggtttggcttactttgggctcctgctttccaccacgctggggccttcttgcttttcttcactatttgtcacctcatgggattctcatgactctgaggcttagacttttacttctttttgccctctgtattgcagacctgacctttatgtgctgttgtgttactttgtagttgagtctttgtttccagagtatctgctttgttcattttttagacttacttattttatgtttatgagtgttttgcctgtatatatgtatgtgtgccatgtgcccagagaggtcagaggaggatctcagaactcatgcaacttaagtcgccatgtgggtgctggaaacagaacaagcacttttaacctcccagccagctttccagcccctcgttgtagatttttttaaaatatcacttttttaaaaaaaatatcattttgtgcatgtttaaatttagagatttcagatgtgatcctttaagaaaaaaggtagataattaggaggtagaaaaagtggcttggactactatacaagtaataatgtaatagtgaaaatatacacaaacgtgcatgtctctctctctctctctccctctctctctctctgtccatctctctccgtctgtctgtccatctgtctctctctgtcttttaagagcctgtggaaagaaacataactatggacttctctggagaggaaacagtagcattctaatccatgatcaccttgctccttgccttttgtaatccatcattcctttaagtatgaaaatctcatcactcacttcttttaagttctggtcattttcaggaaagtatatccttgtaaaaaattaatttctgatcctcgggatatgggaatattctattttatctctattataattctctgatactttcagaattcattctttgtttcttctggttttcctaccactgacaatgtagaatataatgtctttacatgtgcattccagcctaatgaaggatgcttttagtagctcattacaaaataagagattagatgtaagtttcctttttctcttggttccctttataaaattgaaaacaccaccattaataagatatgaagacctacggttggaaagttgggtggtaactcttaacctaactcttgaacgtttgcagccctcactaggctgtgagctgctgaacttgacatccttctgtctgtctgcttcagtctcccagttttcacagccttgaatgtctcagcaggccttgcccttagtctttaaactcagcctgatagtttcctgctgtggccactttgttcttcagaatgttttcaaggttttcccttcttaaagtcagtttcatcttgagctgatttgaagataaagtttctgcagcagaagtttgtaggtccctctgatagaattaacctacttattataggtaaataataaataaataaataaataaataaataaataaataacaggaagtcttctatagtctagtcagctaatagtgaagtcgtaattatttaagatcagttgtttaatatgctagttcagaaacactggtttgtatttttggttgttggttggtgtgtttttagttttggttggttggttggtgttttgttttggtttggtttttttcatggcagggtttctctgtgtatccttgtagaccagggtggtctggaactcagctatcatcgtggctctgcctcttgagtgctgtgccaccactgcccagccataagcagtatttcttaatgccctccctatctgatagtgtaagattcaaagctttgataaatgtcacggagaggattgtattgtgatttcctacaaacatctagatttgttgttccagctatagctccatggttattttgttagtaatagctgttaccatcaccaactgtgtgtggctagaaagggtgttcttgtggaacaggtttttgtgttaaagaaatatttctagttacaagagataataagtaaagtcatatattgtctctgctctgaattggtttcaataatttgttgttgaagacctgttgttaatgagttgggtggtgacttttatggcatgccaagaaaaatattcatacatttaattggagatcttagtttctttagctctctgaattttttaccaagaaatgttgaagtatttctaatatctatttatcacttaaatgtggtttgtctttaactagatatatagttggaaacattctttgaattcagttgttttaaaactacaaatttcatcagaaggcttttcatatgtcaagttaaacattggtttaggtttaacgtgacacaagttggatttcatcatttacattaaaagcagcacaatttcctggcctttttttttttttttaaaagaaaatcagagtaaagagctaaatccgagtggaatggcccagcctgcttcccaagcctgcacagcaagcaggcggctgggtgcagagggagctcacaagaacccactttcacttctaggcgcctctctgcagacagagctacctgtgccacctctggccttgtaactaaagtacttcatgaagttaaagaaaattctcagaaaatgctgcttccttcattctacaaggctactcatagtgctaagatttctgttcttcctggcctttcccccctataaaaatgtcatactttatgtctgcagggttctataactgccagtagagggcactgttgtaacgcaagagaaatgtattgcttccctaactccttgtctgcctttgcaatttgcagtgtttttaaaagcaatattctctatgtaattaaaatccgttctctgtataattagcagttgagccgtattctttgtggcagagtttgtttgtggatggcatttttttaagtctgtgttccatctatagctaagtgcctaaactgccctctattaaaatataggaagttgtgttgctttttctctacactaagcaatgctggagatggaaatgtataaaaattactttaggtttcatttaggccctacgagctaattatccagtagggaacgtttaaaattcttggttccagtggagttaatatgccatggtcaagaggagtgttcgggtgcctggcgtagtagcaggaccgctaattctgtgctagtgctctgctgatgcaagctactgatcaccttagcaagtttgctaataacttttcctttcgtgcttccttaaaatcatatgccatcgatacagttatcaaaccactaaagagtgatgtggaaaggtggctgaaactgcctctcttgcttaactctcataaatgtcatttggagtgactaaatgtgtactcatggcctggcctctgcaggctctggagggcagtgagactagagagtcccagcctggagttcaagcgcccgggccggccggccacacttcgtaagctttatggtttgcctccccaagtagtctaaaatcaaagaaattgatttcaaggccaaactataacgtcttttctcagttttggaactgaaactttatgactaatattttgaaattatttcattttgtgctttaaagttgcaagagaaatttagttgagaatcagaaatcttagcactatgagtagccttgtagaatgaaggaatcagcattttcctgagaattttctttaacttcatgaagtactttagttacaaggccagaggtggcacaggtagctctgtctgcagagaggcgcctagaagtgaaagtgggttcatgtgagctccctctgcacccagccgcctgcctgctgtgcaggcttgggaagtaggctgggccattccactcggatttagctctttacaatctgattttaaaaaacaaaacaaaacactgtgttaacatttgagaagagtgagcctgtgtaagggcactatcataacataaagggaaacacttggaactatctttcaggcctcagtcactggaggtgtcatttcaggatatttgagtttaactaaagtgaaagctgaaaatttcaggctatggtaaggaaggattctgctgtttttcacagagtttttctgatgttatagctgtccccaaaggaagacattcagtttcttccctgttggtcccctgctcctttgtacttcatgggacttcttaagacagaggctttgctgtttgtttaaaatatactaggtaggttagaaaaaaaaataactgaatgttgtttatctgaaggcataaaaccattgctttcttatttcttataaccaaagaggaaataaagcaaaatttccttttgttggagcatttgtattgaatgtggggacttgcctgtattgtcttgtaatggttatcgctgccttttcgcccacagaggctatcacaggttttagtctgggctgtttgtattcagcaaggtcaagataagttttatctctacagataagtcaagtgcattaggatcgataggcaatagtaaaattcgctgaaaatattattgccaagttcttaatgatttttaaagctataagcttgtcatgtggaatatacccatactggtttttatttatttgaatggcactaaaagtgtcattaattatgcaggctttttaaagagacaggaaccgattaaagtagcgtttgggcagccgtgagccgtgagctccagtgttaaactgatgaagtatgagaagctgcttggttttctttttaaagaaaatgccaagagaacaaatattatagaaggcatttataaattaaaaacataacttgagtttccttgttaaaataatcatttttgactttgtatagatatccatcttacccaggggccacgccacagattttggtttccttagctgagaaactctggtgggaaaggaaacctatcctacccgtacgaggagctgtgaggaaccctttgtaagaactgctgcttgagtgtgtgacaggcagagaagacaggaaggacacagactcattcactggtttgtttttaactcagaggaacacccttctgatacctttctcatagagtttcgagtctgtttgtttccattttctgcaggtaagaccaccatcaccttagggcaaatgtacctagaatttattttctttcttggtagcaatcctgctagatgcccccatgcaggggccacattacagttggaaagcacacgctctagagaagttacatgtctcggtgggctttcttctccagcgttatgtaacaacaacgctttgcagactttacagccttgggattccgtattttgttatggctgtatgagtttatgcttttcaatttcttaaaatatatgttcttcgctcttgctcctttagagatcagtcggtggcttttccttgctttaaggggacttttcctctcttagtggataattgaggtaaggagactgggaccaacttcggtgttgatttcaggtgttcttattcctacacaggaaaccgtgtcactcattgccccagaattgtgcctcttgtgttctttcctccctccttctctctcagtacttaatgcatttatgtgaccacttaagtaaaagttatagaaatacttggcacccttctagaaactgttagcattttctttaaaaatttctatagaagatgatctttgggtcgtatgcttcttagttctgatagtgtggcccacacagccaccagtgtagctacagcaatgtttcctcaacacacatacagaaaaagctgtgatttctttctggatcctctagactgtgctgtgagagggagaaagcccaaaggctgtgtggcctcactggctgaagggctgctctaagcactggcgctggcgggcacgcagggagccgtggccccagctgaaaagttacgtgaaagacaagttggtgtctcgtctcagagttatctttgtgtggcaggcctaatgcaacactaagagttagagctttaaaaatagaacaatggtccttttaaaatatagttagtgtagtgaatttacccccaaactctccggtgtctcattactcaaaaaaaaaaaaaaaaaaaaaaagaggagaaactgtcctgccagcaaagaagtgcattggggaaatggccactctctttgagaacattttaattcagttttaatcaagagggcaataaaagaggaaacattttaaaacttggtgttttcttctaggattgattttactgatagaaaataggctgcaaactgtgtcggaagctcccgttgtggcgaacggaagtctgtagctgtgacatgaggtggtttctctgcctagggctttgccttctctgtagaaggaagggacatacctactgaccagaagcagacacgtcacgtgtggtaaatagcttggagcactctttatggttaccttttctttgctcctaagtaattgttaaataaaaattttagtagagaaatgagagcactgtttaagatgaatttttttaaaacagtctgaagtacattttagaattttaaaataattattgtttcctgaaaacaacactttagcttcctgtttagcgaacactcatatttttaactgtgaacctggcgttctgtaagctgaaatagaacattttatataaagttacttggggcaagaaagtctaggtgtaggttatcccacgtgcacatattctaaacatttcctcatggtttcgttaaaagaccacttattgttgaagctttaggtcgagattgttgatatctggtgttcacgggacaaaagaaagggacggtatagaaattagtgtgtgatagctgtctacagtcatgaatgtaaattgttatgtcatgtcgcgtgtaatctgtgaatttggacatcgacacatattttcaaaagttgtgaaagttccttggtttaattattgttatcactggagagatgccaagatcctcatttcccctgaaatcttcccgtgggctggaagggcttttttcacctcctaaagcttgtcttcccctcctcagacaggtggcctgacgccgggaagcgtgctgctttctccctgcacagggacctcatctgcctcctttatcctcagcaatctaagtaactgtcagcctggcctgcggagctctctggagttccttctcgctcgctcgctccattccagtggcgatccctcacctcatgtttagttttgctgttgccgcccttcttgggctgttcaagtctttctttataatgtggctatagcttctgtcacacgaccacacgcttagtctaaagcctcgtagagtacatgagacagtagcagtgtctgagtccttagaggcagttaatactgattttatacaattctgaaaagacagtttgagtgtgtagctttgggactgatcttagacccggtgggtgttgaggtggaatacttagaggccttgccattcctttcatagttgactgtttgcagttattagttagctaatttctcagtgtttaaaacccaagtcagatagccccatttcttagcctgaaattgtctgcaaatgttaaagaaaatatagttgtcatttcttgctcaattcttgaaggcacaaaggggggaaacatttacagtattttggcaccggtttacttctaaatccttggaccgtgaacaaaacatgatatcatatacagtggggtttggggtactattttaatacactagcaatacacattccctttagtaatgtgccatggtaaagcacagaagtgttggagctaagatggctggctgctgagtccttttgaggaagtgacttgaccgagaactacaaagccaatatgggacagaaatagagaacatggcctttaatcacatgacacatgcctcctcctttgggatctcatgtgttattttggagacggctggctgataggagcccctgtctgatggaagcacatgtctttgtctcctcgtgtcatggtccccttgtggcggactcattgtactttaagatctctagtttttcagtgtactgcatttgagtatgtactacatgccactggtgtgcataatgagaggccacaggtgctgtgcctctgacctcacgctgcaaggcatgctaaatacaacctcagcgggcatgcatggcatgagcaggaatttcagaactgttagtgacagaggtggcgcttgagtgaggtttcttggctcttattccagaagcactttagagattgaggcactagaattatgacttgaaggccagcctaaactactcaatggcaagaccctcaaattttgagacccttttaaaagagaaatatataaaattttagatatgaaagctgattaaaatacctatcaataatataataaaggccgtgaaatgttatataacactaaaaaaggatctttaggaagacagagtgtagaaaaatctctcagacgtcaagttcagtgatagaatctaggttcagacagtacctgtgcttgtggcagagtaatgatcagttagaccagtgatcagttagaccacggttcattgggaaggaatagttaccgcagttttctgtctgcatctgagtatgtccaacttgtcaagagccacaattgtaaatggatgtgcttggtgtatatttcttcttcttgttcttgttgatgatagtttgttttctttgtttgatttttttcagtttggattttggggtttttgttgttgttttgttttgttttgttttgtttttgagacagggtttcacatctgactcaccaggatcaccgctttccctgtgggccattattaaataaagtaagggtcacttgatcacaagctatgtgatacttttgcaccgatctgataactgacagggttactaagtgacacaagtactagctagtcggggactgcctggctagcagtgtgggcagtgggctcatttacaccctggactgtggagtgggatggtcctcagaagagcctgcagtctagagtatacatacatatgttatctgtagagggctgtggtctgtaacagcacaagccaggccctctatccactcagtctctagcgtggggacagaggggagaagcagcttcacggctcttaggcctgggagctgctttcctgcttagtaactgagagcagcagtgggagttcagagcggctgcagaccttaaatgagaaacctgtgtacactgtagcacattgccgttccccatcatgatctaatactctgacttgaacatactatgacatctgccttccagtacttcttttagttgtattcaggaagtaaaatctacaagatgagcaaaaactaccattcattgatattattataaagttgtttacaatacctcttgagtgaagagtgagacaggtcacactgtgttccacagcctggttcaagctaatggcagttctccaaccacagcttcaaaagtactgagattccaggcatgtgccacatgtcctaactgtattaagaatagctttaaatgttgtgtgaaatagctttcatatgtggaataaaagcaagcatggtaagaaagtaactaaaaggctagggagaagggtcatagggcaaacacctgccatgcaagcctgaggccctgtgtttgaatccttctgcactcatgaaaagaacctggcatgactgtgcgtgatgtgtgtagggcaagcggcactgtggagggaggagccagaaggatcactgggtgactgcggtttgctggctctcagcccagctcctggtttatggagaaagcctaccctacaggaataagacaaaggcttgtaggatacccaacatcttccacttgtataggcatgtgcacttgggcgcacacaacacacacacacaacacacacacacacacacgatttgaaaaattaagctttcagcagtttgttaactactaccattagaaaagggttcgctagggctggtgagatggctcagtgggtaagagcacccgacagcaattccaaaggtctggagttcaaatcccagcaaccacatggtggctcacaaccatccataaagaaatctgactccctcttctggagtgtctgaagacagcgacagtgtacttacatataataaataaataaatatttaaaaaaaaaaaaaaaagaaaagggttcgctaaggaagattaggtggttcttatgttttatgtaaaatagtttagccatgaccactgtttgacatttttgcttataaaattgtcactgtttggagagaactttttgtgttcaccaagagtcaagaaaggctttgtgttcgcgatggtcctctgtgggtggctggcctctgctctccacctcctttctttactccctgcacttctgctgcgataggggaggggtgagcagaacgcaggtgagagctgcacactgttgagggccgctgaattgactgcctggcgctgaagcagagaagagccctggagtgttcgatgccgagtcatctgaagtcagcccacacaccccaggaaggacttctcagttcacactgatattggggctgacgaaggaaaagccgcggattagacagaccatacctgatggtacctttgacatggccaagatttccttatacttctaatatgccaattaaaaagtgtcaaagtaaattgtagagttgaaacagtgaatcatttccagtggttccagctccagcctgaggacctacagagctcaaggagaggttttccagtggagatttccaggcctctctcccagcccatatatttgaatgctctggttgccgctgctgttcctgggaatgtgacagcctgcctactgcactccattgctccaccctctcttccaagtcttctcttcactgactcttcctttcccatacagatacgcttagagctcaattctccactggaagcccgcctttgcctctaccttcctctaggctcaggtgtccgactgtccttctttaaccccacacttacttcctcagatgtcagacagtaagacactgaccacaaaagcattacctttactcacggggactcagggggacgtgcttagcatctgtttatctaattgcatggagagccttactgacatttcatacatgtacacgggtgtgagccacctgacatgcacacagtctcctcagaaagcctggggcaggatgactagtgctcccttgcttgcctgcagtctacacatgtccctgactggcaggcacttttgtaggcaggatggatggatgccctcaccaaataggaacgaatgaaaggtgaaggacgagggccagcagcagccatcctagaagtctctgaattctgatgctgttgttttgtttttctcaccatgtagccctggctgaccggaaattcctcatgtaaactagagtggcctggaacttctacaactactgtctctgcctcctgaatgctgagactaaatatagtaaacacattggatatggcaagccaactgcatgtacaagtgtgtgtgtacccacgcatcactgaaatcaggggaggacttgctaaaatgaaactggctgtaattcttaactttgacataaatttagtttttttattggattgtttctataaagtcccactgacatgggtagataaataatgtgtgtgctgtgtaggaaagggaaagagagctactgtttgtaagtttctgcatgtgtttcctgtattgtaacctgtcagagtcagatctgagcctagatttcctggtcctgtacccaagctctcacattcgcaagtattctcctgggtagtgtgtctctggcttttgttgccttagctccttgcttcatgtcacagattgctttcggtagcaatctgttttcctcctctggccaggtggatcctggtcctcttctgctgtgactgctgtcttcctcctcctcttcctcctcctactcttcctcctcctcttcctcttcctcttcnnnnnnnnnnnnnnnnnnnnnnnnnnnnnnnnnnnnnnnnnnnnnnnnnnnnnnnnnnnnnnnnnnnnnnnnnnnnnnnnnnnnnnnnnnnnnnnnnnnnnnnnnnnnnnnnnnnnnnnnnnnnnnnnnnnnnnnnnnnnnnnnnnnnnnnnnnnnnnnnnnnnnnnnnnnnnnnnnnnnnnnnnnnnnnnnnnnnnnnnnnnnnnnnnnnnnnnnnnnnnnnnnnnnnnnnnnnnnnnnnnnnnnnnnnnnnnnnnnnnnnnnnnnnnnnnnnnnnnnnnnnnnnnnnnnnnnnnnnnnnnnnnnnnnnnnnnnnnnnnnnnnnnnnnnnnnnnnnnnnnnnnnnnnnnnnnnnnnnnnnnnnnnnnnnnnnnnnnnnnnnnnnnnnnnnnnnnnnnnnnnnnnnnnnnnnnnnnnnnnnnnnnnnnnnnnnnnnnnnnnnnnnnnnnnnnnnnnnnnnnnnnnnnnnnnnnnnnnnnnnnnnnnnnnnnnnnnnnnnnnnnnnnnnnnnnnnnnnnnnnnnnnnnnnnnnnnnnnnnnnnnnnnnnnnnnnnnnnnnnnnnnnnnnnnnnnnnnnnnnnnnnnnnnnnnnnnnnnnnnnnnnnnnnnnnnnnnnnnnnnnnnnnnnnnnnnnnnnnnnnnnnnnnnnnnnnnnnnnnnnnnnnnnnnnnnnnnnnnnnnnnnnnnnnnnnnnnnnnnnnnnnnnnnnnnnnnnnnnnnnnnnnnnnnnnnnnnnnnnnnnnnnnnnnnnnnnnnnnnnnnnnnnnnnnnnnnnnnnnnnnnnnnnnnnnnnnnnnnnnnnnnnnnnnnnnnnnnnnnnnnnnnnnnnnnnnnnnnnnnnnnnnnnnnnnnnnnnnnnnnnnnnnnnnnnnnnnnnnnnnnnnnnnnnnnnnnnnnnnnnnnnnnnnnnnnnnnnnnnnnnnnnnnnnnnnnnnnnnnnnnnnnnnnnnnnnnnnnnnnnnnnnnnnnnnnnnnnnnnnnnnnnnnnnnnnnnnnnnnnnnnnnnnnnnnnnnnnnnnnnnnnnnnnnnnnnnnnnnnnnnnnnnnnnnnnnnnnnnnnnnnnnnnnnnnnnnnnnnnnnnnnnnnnnnnnnngtcttatatagtgcagtacagtgaagtgtggcattggatgtggtgtagtgcagtatagcggtgtatggcatggtgtgcagtattataacgtgtgtgctctggtgttctatagtgtgtgctgtggggtagtctgatacactgctggctcttacttcatgattagatgctgaactatgaaacagtgattttttttctattggtttttgttctaagttggaattcacttcatgaagatctgtgctcatttattcagttaatagtcactaaccagttactacaaatgccaaaatcatctgcgacatttttgacgatataaaaagtatttgtggagactaaagaggtagctcagtagttaagagcactggctgctcttccaggagtcctgagttcaattcccagcaaccacatggtggctcacgatcatctataatccgatgccctcttctggtgtgtctaaagacatctacattgtattcatatacatgaaataaataaataatgtgtgccggggacagggagtggcagggcatgcatctgaagatcacagacaattttgtggaattggttctctcttctctctctcttttctttaaggatttatttattttatttatatgagtacactgtagctgtctgctgccgttacagatggttgtggttgctgggacttgaactcaggacctctggaagagcagtcggtactcttaaccgctgagccatctttttaaccccctctcctcttcctctttatgtgggttgtttcaagacaaagctccagacatcaatcatatacaagagtatccactctgccatcttgccaaatacaatatcgatgatttttgttaaaagctattttagtagttcttttcctctttgagaattttctttgatgagcttgagtctaggctaagactgcatttaggatgggagtggtctgactgaaggatgcaactttttatgtgttactttccagacagacagccttgttccagaaacctccaaatcgtaggcagcttggaactttttatttacgaaacatcatggggtttggttggcatgcttccaagcctctactttagaatgacaaataaatgaagggctttgggatagcttcagtaagcccccaccctctttcactggcccactaaactcctgaccagagaaccacatctgccttgttgttgatctcaacttctctggaaagttctttgaaaagtctggagcagtttttctttccaagggagaagtctcaggactctgaagcattagtgctggtctttaatagcatcttgtgaatagcgcccttgtccagccatgaccaggtagctaggagttgaagatgtgactggctcatgaatccaagagtccttcttacagtagaaagagaaggggtagtgaaatagagggcctttgttaattcttcataaattgggatatggtcctaacgggaaagctgtgggctttgcggcaaagcacccattatgtggcctttgtagtcttggagcctgtagtcctcatctccagagtagagaagagagtacctcctgtacacttgagatgaaggtggatatttatgagtgttccagctgctgctgcttcccattatcacttgcccaccatccacagagagcagtgtgcagaggtgggaggccaggctgggcctatgactgcaatactaaagttaatagaaatagaggaactgtagtggagcagtagaaccacgggcaagaaatggaccagtgagggtcagggcaagtacttgtcccctgtgtgctatgagcttagaatggaaccttgtcctgttgtgttagctggcttctggaaggagacactgatagaagggtgaaggaaactcttcccaaccttaccacttagcccacttttcctcatgctttgcttcctgacactactgaacgcactgagagcacttagacccacagagagctggtcacttgacccatagtgaacatgccatgttctattaacagtggttccttccttcctaatgctgcgaccctttgatatagttcttcatgctgtggtgtcccaactataaaactgctctattgctacttcataactaattttgctgctgttatgaatcataatgtaagcatttaatatgtaagatatctgatatgtggtagtttttcgagacagggtttctctgtacagatttggctgtcttggaactcactctgtagaccaggctagccttgatctcagagatctgcctgcatctgcctccagaggtcagatcctcatgtattgaatctccagctttttttcacctaatattagccagaggaaactctactttattagatcacacccacttggccaagtctttctctgcataattgtggaattaatatctcttcatattcccatgggcctactacattggaggggttggagattctaggcaagccagagtcagtatgggttgttcttagaattctgcctaccttggaacattcaaatgagtatagcaatctcagattggtatctgctctcctgaacattctacgtacgtcactctgtgtctttagtggtgatggtacatttgagagttcctgtcccgctcagaatcgcagtcatgcttgtcagtgtttcctgtggggtgtgctgacagtcttttctcctccacttgagcgtttcctctgactgtcagcaatgaggcacagtgctccatcccattcactgtgccaccgggcagtcggtgagctcttgggcttcactcttagcctgggacctcagaaagttttttgtctaatatttggaaactttttcatttctgtgtactactttcttttagaattgtcattgattagaccttgactgtattaaattcatcccctaatgctgtttttctctttggtctcctcattctttctaagagttattttaaaatagtttaaacttcgtatcaattccatctgcattgcacatcactcactccagccctgctctttccctgtcccttcatatccttcctttgcccttgcagccccccccccccgataaaacacacaaacaacaaaaagcatagaaaacatctcatcgtggaagctgtagtgtgtcacagtgtgtctcacagtagatccctttgtccacatatcttctcttccaaatgttcattgccatgagtcgttgttctggttctagatccttggcttctgtgacaccatcactattgactcctcattggcacgccttccagttatcctgttgctgtcctgtctcacagagatcccgaagctttagaatagcaacgctgtccctttcacacaccccagccagtcgcagatgatacagattttggggtggccaactcagagctttccttgattttattcattatcctttctacatgtttttagttctaagtaatagaatactcaactcaaaatggctgaaacagtaatgttttgtttgttttgttttgttttgttttttttaacttaacaaggaatcaagaatcattgcttctaacactgacacagggactagcaactgacccagggacaaacttgggctcctcttccatcttcccattttcttctgtgtgtgatgatacattcacctttttgccccatcaaagttggccacaaaacattgtgattcttactgcataacagcacaaaaaagcagaaagatggactgtctctaagtttcccccctcttagtggggaagaaaaatcttttcaagaatctcattggttccattagtcagaattaggtcatctagccactcccagctgcccagagtcactggccaggtgaatacctgactgactggcccctgagtgctggatttgggtccttcttggaccttaggagactccttactactacagacaggtcttgatagatagcctctcattgctgtgtctcattgctgtcatgtgacagtggatctggtgttgtaatgtggactccctcttcagaagtaggcactgtggcttgcaaaggcagctgttgccccacagtagacggaatccattagatacggtttgctgtgtaagagcctgggtgagccttgctcaggctttccatgcttggcttcaccctgggagggcagaccgctatcaccgtagacccagatgcgctgctgtgaggcacaggatgccaagccttctactgagtcctcctgcatgatgttccctgggctcttgttggcagtgtgttggttgcttcaataagaatgactctagaagtcttacgtgtggagcactcatttttgtcgtatcctcaaatccagcttgtctcctgactttcatgtttgttctagagtgccagctgttggaaggagagaagaaacatgtttttttaatacacaagcaatataagcctggcacctcttttgtgttctgtggattttgtgcatcctcttgttttttattaataacttcatattctttgttgttgtcatttggttttggcttgttttttgttgttgttttttgtttttgttttgttttcgagacaagatttctctgtgtagccccagctttcctggaactcattctgtagaccaggctggccctcacattcacagagatccatctgcctctgccttccaaatgctgggattaaaggcatgaaccaccaccacctggcaacttcttattcttgattctcttaatacattgtctttcctttaaatggaaatatctcagatactttgtgatcactggatgtggttttatatttaagtgatgtacttaataccaaatgaaagttttgttgggcagaagagatggctcaggggttaagagcactggctattcttccagaggacccaggttcaattcccaacaccttcatggcagctcacaactgtctgtatctccagttccagagggtctggcatcctcacacagacatatatgtacaagcaaagcaaccacataaaaatacataaattctaggggctggggatttagctcagtggtagaacactttcctagcgagttcagagccctggttcggtcctcagctctgggaaaaaaagaaaagaagagcaagtaagtaagttagttttgtttatgtgatcagggatgctttgggctaaccaaactgaggggtgattaggaactagaatttcattgagaaacagtgtccatccctgtgggtctttccacttattttatgaaaaccacccctgtctacttagaaagaagaatcactgtaacccacctgccaggattttgaagggaacattgaaagagtgccttaagaatgatatttgttcattggacagactgaaactttattaaatagattaatcacttgtagtccaaaaatctgaaatctaccatgttcaaaaagacacatgttttgtccacatgccacaagtgggattccgaggtaacctcatgtgacaggatgcagttaaaatgcaagtttatgaagttatgtaaaattaccacacacctgagtaatataaagtaagatgaaccataacgacttcccaagtccaaaccaatgcatctgatactcttctgctcccacacctttcaggtgagagctgctcagctgggccctcttgaacctttgctcttgagagatcttaggtgtccccctcctagccacctcctctccccagatgttaactctcctgtctcctgccagagttgacaagctgggtctgggaaggccatctaagtagctaatttcctacagatgtcaactcccctcttgtcggctccatgtccattttccaatggccccttaacccctcatctccaaactttgtcttgagaagagctgtgtgctcatttacatttctctttactgagagaggagccagtattctgttccctctgcctcagatgttcattcattctccatcctctgaaagctttatgtctgtgtgtatagtatacacatcactgtgctaagaccagaaagcaagcaaaagtagtctctatcttcaggaagcttatgtgctacagaacactggaaacagccaagaaatgatgagaatacatattctttaacagtttcattcatatatatatgttatatatatataacacacacacacacatatatatatatataaacgttctgattacataatagtatatgagagcaatttcaaataaattagtcattcctgttacctactgaagactggaaccggttctccatagttactgaagtcctttttgaagaatggctcacgaagtcagctgcctgcctctaaaatctgaggacctcccttagtatgcccagtgcccatgcacctgggtatcctggtgttcaccaaaaccttagagttagaggacagaggtaggaagccctgcagctgctgaccagtgagcctacccaattgttgagctccggattcagtatgagaccgtgtcgtaggtgattggttaagaaagttacttgagatagctatatcaggggcctgtcagcaaaatcttgctggcatatgcaatagtgtctgggtttgttggttgtttatgggatggatccctgggtggggcagtctctggatggtccttccttccatctcagctcagaacttttgtctctgtaactccttccatgggtactttaagaaaatatcttaaaaaaaaaaaaagagcagagataaaagggaaattttaggcaaaacacatctttttaagttaaagtgagccacacaaaatagtgggtaacttttctatggtgctttaccaaaggggagatgggccctctctctcctgccactcagggccaggattcatgttgtaggctttcagaaatgtttaagaaccattgcaatgtggtgcaagacactgaatttattgaataagttgtattttgactaattttttatttataatgttactacctgggaatcatgagtaataaattgttctgggtgatatttaataatcaagtaagaagtaaaagaattagactgccattattttcctcaaaagaaagaaagaaaggaaggaagaaattaattaattaattaattaattaattaattagaggagctggagatatggctcaggggttaagagcactgacctgtcttccaaaggtcctaagttcaattcccagcatccacatggtggatcacaaccatctgtaatgggatctgatgccctcttctggcgtgcaaatgtacatgcaggcaaaatatccatatacgtaaataaataaatctaaaaaaagaaagaaagatacttgagggtgacctgtgcaccgcgtgccctcagatgccctttgagtcacatctagatttagtacagtacctcatgtaacttgatgttctttaagttggaagagtgatcaggaaaaaaaggcagcacgtgttcaggacagaggcagttttctttgcagtgtttttgattggtagttgtctgaatctgatgatgtgaaaccaatgtgtgtggagcagagacagagtgagtgagagagtgagtgagtgagtgagtgggtgggtgagtgagagagtgagtgagtgagaaagagagagtgagtgagagagagacagagtgagtgagtgagtgggtgagtgagagtgagtgagagtgagagacagagtgagagagtgagagagtgagtgagtgagtgggtgagtgagagagtgagtgagtgagaaagagagagtgagtgagagagagagacagagtgagtgagtgagtgggtgagtgagagtgagtgggtgagtgagagagtgagagacagagtgagtgagtgagtgggtgggtgagagagtgagtgagtgagagagtgggtgagtgagtactcaagtgacagagtgagtgagtgagtgagtgagagacagagtgagtgggtgagtgagtgagtgagtaagtgagagagtgagagacagagtgagtgagtgagtgagtgagtgagagagtgagagacagagtgagtgagtgagagagagtgagtgagtaagagagtgagtgagtgagagagagtgagtgagtaagagagtgagtgagtgagagagtgggtgagtgagagagtgagagaggactgacttaaacttttaatggaggctcttgttttcacaccatgaagctatttcttttataccttttgctattttagaagttcaaagtggcagataaagtagaggtcttttttttaaagatgtattcatggcttgtatgttactgtatgtatatgtttgcgtatatgagtgtgtatgaccgtgtaccagcatatacagtgttcagggacacagaaagagaatgtgagaccctcttgaactggcgctacagaagttgtgagctgccatctgggtgctggaagctgagcctctcctgctccaggtggttgcttatgtgagtcatggctgaagtgaccagagagtcacgattgcattgggacacttcagaagccctgtcgttgttacagaaagtctttatcacttttcttcttgacatacttaaatagcaagttccttgtttgaagggaggtacaaaataaggtacagagtgcttaactcaactgttcgtggaaattttctctgtttaagattttatttggaagcttgtggaattttttttctaaacatgaaatcattttttaaaatttttggtaaattaaaatagaattgcatcattcccccctccccgcattctctcctatatcagcccttcccaaattcatgacttcctcccctttagacattgttgttacttatacatataaaaatataaatataacctgctggatgcttttggtgttatctgcatatatgtttctaaagctgaccacttaatattacataagaatccttggggaaaactaattctccccttttcagtgtgaaatcataatttttagaatgatagtaaatttaatataaaataagtcactcaaataatatatgttaattttaaaattattactaaaaccaatgcttcatgaaggagtactatacaagtatttataatttcagtgttctttatatacatttttttctagatgctttgatttttttaaaggtagaccaagaatttaaaaacttattttagattatttaaagttactgatattttgtcattgattataatttagtttaaaatggaccatattataaacttgtggatttgacatgttatctagacaggggttgtcatctatattattaaagttgcttgtaattgaatttaattgctgtaatattctgatgaataatttttaaagaaaattatgaagaaaaaaatcgagataaatatattcttgaagtgtttccctaactccacagattctgtgctgcacaagtcaggagtatttcatgaatgaagttaattgcccacagggcgcatgttggcctctctaaaattcttataaaaacaaagaaattaattatccagcacgaaaacaaggcctactctttctggcaaacattcaattaactttttagtgcttgctgtttaatgttggttttgaccaaccaaccattgaaaactgttttcctttgaaaccaggcttaagcagaaaacagtgttacttggagctggttaggtggtcgggttcactgggtcatcagcttttcccatgatctctgaagtcagtgacctgttctgttttgaactcactgcaagatgtgccttgaacacatttggttttgtctttagtatttaatagagtcaacctctcagatatattagaataaccagaaaaaaatctttatttagatttcatgaaaagatatttcgatactgtaataattctgttaacaaattataccttattagccaaggcctgtgacaatcacatttaaattattatattgaaagtagatactggtgtgtcttttctttctgatattttacaagataaacacctctgtacactggaaggtttgatagccctgttatttctcagtctttgaacgtttttgctacacactcacagttcccctcaattttctgagccatgtaagagtcactactcaggttttgacagttcacccttgtacagtatgcactaagaacaaggacagtgaccctcggcaccctcaggttgacaacgctggtgtgacgtaactgttctgtctgcccccgttttccctgtctggagttagttagcgctctcagctggaccctcagtccgggaatcccttcaggagcattcttcaatctccaacagcatgcagcctttacacagagggatctttgtttcctgggacatgaacgcatacatgcatatgtacggttgtttcctcagggttaaacctggggagaactgtagttaggagcactttgcagggtcactcttagcatttcctgcgttgccagggctcactgggcagctggtctgtttgagggtcatttagctcaagtatctacctgctactgttaactgcaagccagcctttcccatttctagttcacgagaggcagagaggaatgtataaatataaagcgtcatgcttagcatttagtgacgcgtcttaccgaggccagttactaaaagtaagattgaccgcctttgctttcatttcctctacactgaaattttctcctttcttgttctgttggctctgctctgctctgctctgggtggtttttgtttttggttgtttttgtttttgttttgttttttgagacagggtttctctgtacatcctggatatcctggaactcactctgtagaccaggctggcctcaaactcagaaatccgcctgcctctgcctcccaagtgctgggattaaaggcgtgggccaccactgcctggcttctttttagtttttttaaagcagcctttctaggcagctcaagctgtctttgaacttgcatcctcctgcctcagatttcctgggcttgcaggcccatgtatcaccacacccaacaaattggaaaagattttttaaaagttacacttttgtgcttgttttacttattaacctcaactcaggattctttcttactcaatgtgtagtaatgcccctgcctggacacgtgaggaccccatctgcctctggtgtcctctgagaaatattcctccctattttttggagcctttactctgtttttaacccccctgctctagagtcctgtacatatctactttattgcagcttagactgagccgcttcttgtggaagaccagcttccttcagtgacatttggtatgtaggaagtaattccattgcatgtgggctaaagaactcactgctctcctagacttcagttcccagcacccacattgtatggctcacaactacctgaaagtccagttccaggggatgcagccccctcctattgcctgagtatccacacatgatgatatatacgcacagagatacatacacaagtacataaataaaaatattttaaaattgtgtttcgtaacattttttaagctaataaactttttttttgattggctattttctttatttacatttcaaatgttttcccctttccaggtctccccttctgaaacctatcccatccccccctctgcctgcctctatgagggtgcttccccacctacccactcccatcttcccgccctggcattcccctacactggggcatggaacaacctcaggctcaagggcctctcctcccactaatgtccaacaagcccatcttctgccacatatgtggccagcactatgggtcactactccatgtgtattctctggttggtggtccagtccctgggaactccagggggtctggtccttaatgtttattttattaacatattttgaacctttctggttgtatagaaccctttcttcaacaaacattgacatggaaacctgatatgtaagagagattaacttggatctgctctgtttgaagtcgtcatgggcagttgagtctctaccagagtgttggttctccaactagcttgcatgcgacttctgggcacaaccacatttctttcaagtcagtgagtttggaatgaaactgaggaatgtacagagccagagccttggacattttacgtatcagtcaaagctaggattatatcttctacctttgggggctttggggtgtgttgtctgcagtgtatttagtagtgtataccactcggaccattggtccattgctggagcttattataaatgcatgtccacaaccctcgttctaaaccaacaaaagatctgacgcttagggtttgtacttttgagaactctgaagttgattcttttttttttttaattaggtattttcttcatttacatttccaatgctatcccaaaagtcccccatacgctcccccacccactcccccacccacccactcccactttgtggccctggcgttttcccctgtactgaggcatataaagtttgcaagaccaatgggcctctttccactgatgaccgactaggccatcttctgattcatatgcagctagagacacgagctgggggtgggggggttattggttagttcatattgttgttccacctataggattgcagatccctttagctcctccattgggggccctgtgatccatccaatagctgactgtgagcatccacttctgtatttgccaggccccggcatagtctcataagagacagccatatctgggtcctttcagcaaaatcttgctagtgtatgcaatggtgtcagcgtttggaagctgattatgggatggatccccggatatggcagtctctagatagtccatcctttcgtcacagctccaaattttgtctctgtaactccttccatgggtgttttgtttcctattctaagaaggggcaaagtgtccacactttggtcttcgttcttcttgagtttcgtgtgttttgcaaattgtatcttatatcttgggtatcctaagtttctgggctaatatccacttatcagtgagtacatattgtgtgagttcctttgtgattgggttacctcactcaggatgatgccctccaggtccatccatttgcctaggaatttcataaattcattctttttaatagctgagtagtactccattgtgtaaatgtaccacattttctgtatccattcctctgttgaggggtatctgggttctttccagcttctggctattataaataaggctgctatgaacatagtggagcatgtgtccttattacaagttggaacatcttctgggtatatgcccaggagaggtattgctggatcttccagtagtactatgtccaattttctgaggaagcgccagactgatttccagagtggttgtacaagcttgcaatcccaccagcaatgaaggagtgttcctctttctccacatccacgccagcatctgctgtcacctgaattttttttttccattttttattaggtatttagctcatttacatttccaatgctatacccaaaaagtcccccttacccacccacccccactcccctacccacccactccccccctttggccctggcgttcccctgtaccggggcacacaaagtctgcgtgtccaataaggatggaccatgtagagtcacctgaatttttgatctttgccattctgactggagtgaagtggaatctcagtgttgttttgatttgcatttccctgatgattaaggatgttgaacattttttcaggtgcttctcagccattcggtattcctcaggtgcgaattctttgtttagctctgagccccatttttaatggggttattcgattttctggagtccaccttcttgcgttcttatattggctgaagtgaggaactgctcacctgggtataccctgctcccgagcttaggagcagcttaagaaactcccatggagagaaggatgcccacctctctctacccaacaaagtgatcttcccactagtttacgttcttgattctaccaaaagcttccttgaccttcactgtatccagagcgttaaagaggcagctgcatttgtcaccagtttcaaaggtcgtgcgtgtaaagagaaagaggggctgaatgttccacttagtgctggggcagcttcacagtgaaagccctaagctccaccctccagcacaggatgcgttgtggagtgaacccgtagctcactgatttgcctagcctagctggtgaatcccctccagggagctgcctgtttgtgtctgccatgccacgattggtgccagggtcacaggattttgtatgtgatctagagagctatgctaatgtcctcatgcctgcacagcaacacttgaacaactgagcctctctccagccccaagaaagggaatttgtagctcctccttccttttctgaaatgcaataccattgaatcaaagccacaccatatgacctcagatagcctcagttaacactttaaaaggtcagtcactgtctgaagtcacgtggggcataatccagaccatgacaaatggaagtgaattaggagaaaaaagcctagggtctgtccccgcagctccttacgcttttgtttgctgcctctcctagcagtattttatagtttctatttctttgtcttttaaataacagaaatgtggaaattagacctttcatgccatcatgttttgggcttacttttaaaaatctctttagataggaaactcgccacccagttttgcatcttcaaagatgagtgctgcagtttcccttttgtctgtcatctcttagtagaccttatcctagcacacatgtccatatcccctgtgccagggccagtcctcaagtctctcttcaaccactgaggagtcttgacttcactgtaagtagcaggcagtgtctgctgatgtagcctaataaacatctgtaaaaaacctcaaagctgagtgcaaatgtgacttagttcctttagcaaacaaatgttataaaacaattgaggctgagaacagagattgtccaaatgagattcatgtgtgcagttcaagattaattccttacttgaagactcaattaaaacatatcattgtgggaggggggtgaattttcttatgaatttacatatggagtagttattcaaattgttattaattttgattggtctgacactggtgttaagtatatgtttctttaaggtgtctgggagtttcatgttgcatctgaggttcatgctaaaaatgcagttgaagagccaggctgatggcccatgcctttaatcccagcacttgggaggctgaagcaggtggatctctgtgagttcaaggccagcctggtctacaagcaagtctaggacattcagggttacacagagaaaccctgtctcagaaaaccagaaagaaaaagaaataagagaagagtggctggcctcctgtcttcaggctcaccacttaccatgactcgcatgtgtgtacacatgggcacgcatgttcacacgttcacatgtattcatcacatacagcatacaacatcacatacacaaaagggataaatgagaagggatttgacttcaaaatgtttgcattttaatgttttcaatgttggaagttcactgcaattattgaatctgttatgaatatatatatgtatatattttttcttttttttcctaatttttttgaggaagataggccagtacacaggctatgcttttcaaatagagaattcatttatgaaacatgttaatagttgccactttgaagtttgttgttcaagcattgatctggtaatcttttcattgtacaaataggtatttacttaaaacagggatggccccacatgtgtccctatcaaaagtttttgtgaaaaacccacgcctctttcccttgtcgttcatgtcagagagtgaactcttgctagagtttagagtaatatttcatagactcactccttagtaactgtatcaacccaagttcattaacaccaagtcacactttagcaccacgtcttgtttgactaggttgtggattgttcactgtggcccccccccttacagcaagtgtttggttggatgccaccatgcagcagttaaaccttcatacaacgccaggagccttgctgtcgctcagcgagatgctcttctttatcactgtgtcaccatgctgtgtcttcaactccctccggcaatttatgttacaccgcttattttgccattgttctttagttgtgcatactgatagaaattgttacctacaaaatagcatatagttaacctcatgtacctcccgcctttactcttcgatatcctaggggaacctttgcttatgctactaagaacttaaaaagttaagaatatagatctgcattaattctaaaagtccgtcagtcggtatgttcacatacctacatgtagcccagcttcagttcacttataattaacaccacatctcaccttttcctcctatataataggcttttgggatagtcagcgctcttaagggtatgttttctttccatagtggctttttaaagagtgtgtgtttaagagtctttcactgttggttttattcctaagtttgtaagcctgtgttgccatgaactgtgtctcggagcaacctaggaatgtttgccacttgttttcaacacagaggcttttctggtttctttgctgttaaagacattctctttcttgataatatccttgttttgatgtggctgactagatcacttcacagtgtgtggctgtctaggaggtccctgaggcagcctgacctgctgactagacctcatgcagtgtacacttattgactgcctactgtgtgcataaacttgtttgctgacatgacagcacagtcaatgaagtaaacaaagttcttcaacttgagcctacgttttagtttggagacaaaatctaaaagaaacaaacaccagttaggacagtttcaagctgtaataaggctattggtgaccaagacgagagcagcttcagaaggacctgaggagagcatactatgataggagagagtgaagaaagcctgtagcatgcaaaagtggagacagtgggtccatcaggctgtgctgacgggcggccgtacagagaacaaacagctggagaccctagctggtcctaccaagaactggactacaatatacactcaatgattgtcttccttctatgtggatgggaaaatctttgttcccagccccccaccccccaccccccacccccacacacatgcgcacattcttttaaaaagctttaggaacatttgtatataaataaatgcctggttcatttgttggttacatgaatgctgtgggttttgtgtaattttaatcattgcttataatattgggcttttcatggtgtgtattttgttctgatatgtaagtgataaagtgtgtttctagccatcttatcctaaatacaatcatactgatttttatgtaacataaaacaaaatagaaaataatctcctagtgtctattctgtataatccagagaaacagtttctacagagcaagtctcgctggaacaatgtaaatgccgtgtcttgtttatttgatagaaactggcattttaaaagtcagagtagagataaaaatcacagttaattgttttcattctttaaactggtagggctaaccctgatggcttttatatttactgctaaaacatttctcaaataaaacttacctttattataaatagtttaaggaactgcctggaagggagactggcttgtcaatttagaaagttaataatttttgtgacaatactgtagctacaaagtcgttgcaagttttccaaatctcggtgctcactgaccttccacttgaacctaactgtaatgtaaacattttcttgaggtggttaggggctggaccggccaatctggagggtattagcagtgttctcttgggaggttggaaccctgggtaattctcaggagctcctttccaagccagagtctgtcttcaatatcacatattgcttaattctgctgtgctcttgctaataatgcctaccgtgcctcttggaaatctcattagttaaaaacgtaattaggttgcctttgaagtagagggtgagggcagtctgtatgtggaagctttcctgccccttccgtgccagttgctaaaatacatagagtggggttcagcctgctgaggcctgggcttattgcccttgggtctcaaaagtctgacttttaggaatctattacacatccaaaatatttttgttcaaagcaaagctaagtactttatcaactccttttgacccgtcagttcctttaaaccttctgaggtgtactgagcagtgtttttcaaacttcaggtcctgacccattaatagtcattaaatcagtttagtgggttaaaaccagcattttaaaacgttaatagaatatagcaatcatagtaagggcaggcattgtctcgaggtggttttgtcccattcagacagacgtgtgtgtgtgtgtgtgtgtgtgtgtgtgtgtgtgtgtgtgtttccgtctaaatgtgaagaaggaagacacttatttgctctggatgaccctcggaggctggaaagtcttactatagaggatattttacagaaaggatttataatctcatgtttaaatgtttacattttaattccttgaatttttagctaatgcccgagttccttaatattttaaaggaaacttagaagacagagggttaaagaaactacattttcaaactgattcttcatttcatatttgaacattgcactacaaccaaaaggcaaacttagccagacttgtgctccctcattcacattctactggacagctgttttttccacatagaaaaagaaaacaataccgagtggaaatggaactgtttggtagcagtgcagacattttatgtaaaagatttacatgcattgagggaaaccattgcttcatttaagatggtagtgaatgggtgcaggcttgtgttcaaatcctttaagtctctacttgctttactctgtgtccttccaaacaatgacttcgtctctcgcagcattcagcctaaatacttttttcaaaaatgcttgccctttaccacatcaacgtcagatttctcaaacttataatggagtagttcgttcttttttttttttaagatttatttgtttatcatatgtaagtacactgtagctgtcttcagacactccagaagagggcgtcagatctcattacggatggttgtgagccaccatgtggttgctgggatttgaactcaagacctttggaagagcagtcagtgctcttacccgctgagccatctcgccagcctggagtagttctttctattgaacattttttctgctcactaaataaacattgaactctattgttaattatttaaacttttagactagatttgtatttgagcactgatgctcaaatgtattgtaattttttttatataatgttaaccttaatttctccaaactcttctcctttgtgaaataggtgatgattagttatattccagacatcaaactgatacctggctgtcttttcacatctccaagttgcaaacccgtgtgttctgattcagactgtgggacgtgatgcttcatgtaagtgcggtggagataagagtacagcacactgagaagaacaaagacatagagaccagtcagggctcatcagagagacccgctcccccaaaagaagtacccagtcacgctcaagtagcacattcctaaagcagatagcaggctcttggtcatggcttaatagtggcttttagtgttttgattacccgctgtcagttttacatccggtataaagtattgtatcctcaagttataagtaagcatgctcctcttcagaatatttagaaggcacttaggctcattttatcccagttatctcactttaaagacaccaaaagtagactgagtgccttcctggacgaccctgtgcctccataccctgcagtgtatgcatttaaactatcgcatgcactgtttctcttgatgtatgaaaatctgtgcaattaatgttttcatcgtgtattcatttttatctttgtacacgaacaagcaaaagttgtcaaagtgcaagcgcatgtgtttacacagtcatgaccgccagaagcttgaactcaaggcaagggtgatgctcgctcctggtgtgtagtatctttaagaaagtcagagtaagaacagctggcaagtagaatttcaacatgccttggtttttctcaactcatgacataaagggtttacttcgccctttatttaccacgttgttgcaggttctgtgtgtatcatgaaaataggctttcgggctgcacatggaactttgcctgtcatgtgctagatatagtgtcatactttcaaggcaatgccgatgtctttcttctcacatctttatgttgaaagtggttcaaaatgaacttaggcattagttttccgacctcattttatttttgaagtcagtgttactgtgttggctctaaagcaaacaaaagcaaaaccatttcttccctcttgcagttgctttgatgttcattctgaattagagtggccgatgcatgatgataaatgttctgctaaatacaaagcatgccttaagtacaaacaaaatatgaacttttttcccccaattattttcattccctgtacaaatatcactgtagctgatcagctgttgtatggaataaatggagaaagaattaaatttttccacatgattgactttttatacaaaaagcaaggctgatatcctgaataagaaactttcccagcactgacatttggtgagaagtaataacagagctgtcccttttcacctgaacataaagagcactctaaagaaaaggacgcttcaccagtgaatcccgtagtctacacaccgaagtgctaagacagtgaaactgtgcacctaacagtgtgtatgctgtcctttcttaacagcatcttagagcattgattgatgctaaaaaagaagcacttagtatctttttaaccagcaggagttaaaactcccattagcacaaagccactgcagaaacccaccatgctcagatagtgtgtttcaattttacaaggtgcctgggtaggctaaattgtttctgtaatgtagctagtccaactcagtctctgtgctcccctctcttacatgaactgcagttccccatgagctttgccttcaggtctgtgattggcacatcaaaccatggcagacccagaagtccagtgcatcgccctttacacaccttgacatggtgtgcctgccagttcctttctcaacattaaattcatggttttggacaaaaattaagaactctctgttgttttgggagagcagctcattggtggaaggcctggttggcacttgtgaggtcctaggctgtccccagaacactgtccaaaagaaagaagagacagaactgtgcagtagagatccagcaactgatgggaattccttgatgatctcgcctttaaaaaacagaaggttttaatttgtgcattacagaaaaattacacaatagatttttttggtggggggaggaaacctttgatttttcaagcctcattgtcttttctgcctttgtgtgctgcctcatgtgtatcatgggtagttagtgcacatcttcctgtctatgcaccactgtcctccctccaagagaagccattgcctccagctgccacatctcacacacccagatctttgcagagctctgtccctgtcagaaattctctgtcaaccaagattctcctttaggggtgagcatgtcagtttcgttttctgacaccttctctcattttatctttaggattttaggaaccgtgtgaagacactgagacattagtaaagtgaggcactatgaaagtagggaaaccactgcgcaccctgagttcagtatgtagagaagctaagtgacagcgtgatagcattgagttcagatccacagagcctacatgaagctagacacaatacacctggagtcccagcactccacagtgagatgggaggaaaagataggaaaattccaggaaacttatgccacttagcctgatatccacattggcaaatggcaagacaccctgtttcaaataagttggtgggtgaagaccaataattgaggttatcttctgacctccacatatggctcctgcttacatgagacactaacacaaaggaacacatctgggaaggaggcagcctgtcagaggcagagactaactaaaccaaaccaaactaaactaagctaagctaaacaggcccttaccctaaaactggcaggaaactttccaggtaccaatactttttgtgtctcaaggttaaccaaatttggtatgttatatatttgaccaagagaatttaaaaataattacttatatatattttgaatcttatataaaattcttaccatcccaatgaggaaagagttattaggcagcttgaattataaagaaaatcacagagtgcttgtgttgtcgcagtttaaaaaaaaaaaaacgattttagggtttagtaggcttgccttacaagcaatatttgagttgcatccccagaacccacattaaaaaaaaaaacaaacaagggagaagaaagtattatgtgtttatgatctagctgtggagagagaatagactcagtgcccagctatcctagtacttggctagttccaggccagtgagagagaaatcttattatgaaaaacatggtagacaaacatagttgtcctttagcctctgtacactcacatgtgtataaccacactaatggccacacacacacacatcacacacattcatattctctctctctctctctctctctctctctctctctctctctctctcgtctctcgtctctcgtctctcgtctctcgtctctcgtcaaaggtagccaagtgtggtggtacagaccttaatctcagcactttgaagagagcagcaaaaggttcaggagtttatggtcaaccctggctacacagagagtttaagaccaccaacagggaccctgcctcaaaatgaaacaaacaaaataccttgtaaaagtaatttttgttggcctgttgtgattgtcatctcagaggcttgctgctgaataagctcactctttctagctctgaattctgaactcgagcaggctggttcaactcagctcttctcgctcaaactcctctccacgctgactgattcaatcttgcttctcttaggctctcactgaattgttctgcttggcctcaaactaactctggcattttgttctattcttctgactccttctcactctctggttcattctgtcttcatctgtgtctatcttgttctctctgcagcctttctgtaaaactgtctaggtaaaaaactgccttcgctctgtctgctcttaagtagactctttcttgtctattctcatgagagttggacgtatcctatctctttctgtcaaatttttaattcatcactttcaaacatggctgtttccttctacaaactaatcttgcctacattgtttgcgattaaaggtgtgtactaaggatgagtctatattccagccagagcagccatgttgctggaataaaattaccctccaatacctttttggtaataaattttctacaaggactcttaaaatctcaacagctacttgtgtcagttgcaagataaagtatcttttaaattgactactaatcttttttttatactgtcctatttttttccctttcggaatctgattttgagctcaatatatgtaaaataagaattttgattatcacatttcagattagtaaagtatatctttaagactttactgctttttcatcatggagaaaatgaagattgtttcagagttatgagaacatttttgtattaacaataccagaaagaaaattatggtgcatttctcttagatttaacatcatacacatataaccagtggcactgttacacatggtgtagacccaaagataaaatggacaatcaaggaaaacagtaactagatgagaaaacagatgttctgggaagagctgctccttgtcacaaggtagccgtgcctcatcaggtggcagagatatgccccactgtgccaaggcttccttcactccaaagccacctgagagaatgtcacctactcatctttgaaattcaagaaggcaagattaatttcaaatgctgttgaacggctaagtgtggaaagggttggctgctgagcacaacttgctttgtctgtgtgctgtgtggcggccatggaactgcctgagctccccaccaccaggttccactcatgtgagcatcttcccacgttcttacaagtcctcctcactggttgttgtcaggcctttaagaactgtttgctcatgaaaactggaaacactgtaactctgtttctaccgcatcccagtttctttccacttccccagcagtagctcaggctacagtactggctttagatgaggtcctcacagaaacttaggtatgcaccaagagctcatgtatagaatggttttccgttgtctttagaacagataatatgtaaagtatccctaaattcaaccttataaagttggttgcagggccatatgacatagcacaatgttagaacacttactcaacatgcacaggacctgggttctaaccccagtcctacagggaaaaaagtcacaactttttcttttctacttttgattcattggtttgctctaagttcacagccgactggtctctatagcaagttctaggccaccaaggaaggactgcgcagtgaaatatatttcagagcactgccaccccatcctaacagtcacagtcacataagacgatcttgcttgtaaagggatattttcaaaacactttttattgattctttgtgagtttcacaacgtgtactccaatctcactcatctccctatccctcaatatctgccctccacccttgtaaacccctgcctccgctgtggaagctgcagtgtgtcacagtatgtcacacagtaagatatacacacacacgcacgcgcacacacacacacatacacccttctgcccaaacatctctacttacaaatgttccattgctgtgagccattggtctggttcaaggccttggcttctgctacactgtcaatactggaccctcactggcactcctgcacgatcctactgttgccctgtgtcatagtagtcctgcagctttggttctgcaggactggccagcaaaggggcattgtcattcagagtggaacctgtataaatgtgtcagcttccagacttggagacgtggttcaacagttaagagcactggctgctcttccagaggagcaacattcaattcccagcacccacgtgattagtggctgacacccatctataactctagtctccatggatctgacaccctttctggcttccataggcattgtgcacacatgatgcacagacatacatgcagacgaaatacccacacacattaaacaaataaataatagtgtctactaggaaatctcaaagaagacactctgtcctctaaatctggacttttttttttcttatcttttttttcttttgatttctaaatttttcgctaagaattatatgttttattgcctatgaaatttatttaaagtgactgatcaaaacttgattcttttaaaaactgtcttttttttttttttttttttaatgtgtatgggtgatttccctgcatgggtgtctgggcacacagtgtgcagtgcctatggaggctggaagaagatccttggaactagggtgacagccagccatgtgccactgtgtaagtgctgggatacactaagtgatagtatagatgctgatgtaaagacttctgactgtccgcaatagaaagagccacagatacagacgctcctcttattgttttctctgtttcctctggatataagttccaggtagatgagagtttatatctctttattccttgctgtgtcgcagaacttagcactaaagatttattggatggtctaattaaaatagttacagtgcaacaaactcacttgtattctgcatcagtttgcattgttagacatctaggtggggatttgcataagtgaatttttatctttatcaaaatgctattgtaatctatgacgatattttcaaattatgttgtaggttttcttttataaccagagttataataatggtttctctgatcctcagtgagcctttggagagtgtaggactttgcttgtgttcacagccgtgagctgctgtgtggtcagttaaaccagaggcaagtgctgagatgctctcggctgcagatgtgttattttctactcacaggtttgtaggaaatggtgcaacgtggaccatcttagtaagatgtacaaataagggtgtgtgtgtgtgtgtgtgtgtgtgtgtgtgtgtgtgtgtgtgttggggcaaatagttcctatttagtaatttctttgttgaaattgtttttattgcatgtccaattagagaaagtcagagagcaagtagactcatgtgccacagcacatggaagtcaaaggacatctttctggagttgcttctctcctcccactgtgtaggtcccaggaatcaaacccaaatcataagacttgacagcaagcaccttcacccagtgagccatctcactagcccctgtttagtcatttctttttcagttcagaaaactgacctttttttgagtatcaaactttcttgatacctgacccctagagaagcaggcttattataaattaggcaagttgtagaactgaaggcatattcttatgaaaagattttcttctacaaagagaattgctttttagtgtcttggatttgcttgtactgtgtagtgacatgctgggagagaatatttattatggtaaaagccaaattttcacacttgaatttaatgtaacaactatgttttttgaaatgcacagttgtatcttaaagataatttcaccttctagattattctcttttaactctttaattttactcaggagttagttcttagcatgagaaatgttttgtagagacaagtcgtataagaattaaaattcaaggatctcttcatttgtactagagagctttcatttgttgctagcttcaaaaatgtgtattatttcatcagttcagtcagttacagttaagtacagctgtgtgaagctgggttgttaggactgtgtgtggcatgtagtatgggctgggatatctatgtgagttcatgtgcatcacatatatcctggagcccagagaagccagaagaggatgtcaggtgccctggaactggagttccaggaagctgtgagctcccatgtgggagctggggtcagactccagtcctctgacagagcagtaacctttaatagctgaagggtaggtagttcagcctttctccactccgatcttgctttttgagacaaagtctcactggaatctggaacttgacttttaggctagactggctgactaggagtctgtctgtctctacctccccagagcagaattcatcaagtacatgccagcacacctacattgttatgagagttccgagaatcaaagtcagacagagacctttgtttttatgccagaagcctgttactctctgatccagcgcctcaatctcacaaacagtcgagctctgtagttgttgaatgcaaggactcgggtgacccatgggtacagaaggctgactgtaggctctcaactgatgtgcacccgattcctgctcagctgggtgggctttaagtggtcacacttttccaactctgtcgctgaatttcagagaacacactgatttccctatccatctaacacagtgatctggaacaaaaagtaaaatgtgtgctccctgcttctgtagccgagagtgagcagcgtggtcaagggtctgcagcttctcctttgtttagttagagactgttgtgtagccgagtccagtttatctagaacactaagggagaggagaagcatgactgagtagagtaaataccattttatcagcacagtcatgtattccctatgacacagatgaaagaactcttgaataatttttctagtcagcaacgctatagatgcagctaatactcttatacatttttgcccctattacataaaattggcatcagaagatcaaatgatttctatctgccaaatctgaggtgcatatactgactataccaagaagaatttgatgtaagctgtgcgtttattgccatctgatatccttgagaatctttgaggttagagaaaagttgcccaattgttgaatttaggttacttttgctttattaagatgttatgtgtgtgactcctgtacctaatatctctggcggaagttaagtatctgcaagtactcttaacttttgagtcatctctccaaccccaacaaaccccaggtttgcaaatcttagctcatgatagcattgcatgttcttcgatttgatggtgtaaatgagtgttgagcaataggcaatgagtgtaaatagtgtgcacttcctgcagttgctccacaggccttttaagagtggttggtgtgtatctggtactggatctacagaaacgttcatgcagtccctccctttgcttatatggctgtaacttcaggaaaaagtcagaaaataaataggttgtttataatttattgcagttgataaagtcacagcaatgtactaggtgtttgagcagtgtgggttttataagtatggattcagaacatattttacatatttattattcaagaaaattatcttacaaaatctcttatggatttgtgctttatttagtgttcagacaccacaagtattagaaacttccttagaaacacattcaatatgaagactataatttaatttggggaaataatatgaaacagcatgcaattatgtgcagtattttcttactgatctcatttcattctactgctctgaacttcttccctttctcatcaggtttttgtacttttgaaaagtaaaagccgctgtgttagtcagcatgggcattaaccctgtttaaagagtgtacagaatagatctctccactagaatggtagcaggcttcacctcgaatggtaaataacttttctgcttggaaaacacacacagctccttgaagaaacttagcatcttcagcagttgccagtccatcagaaaggcctggctagagatttctgttaagagacagtgcggatgtgggaaggagggggagggcaattgtctgagtgcccatcagggtttatgtgtcataaatgtgcagccagaattgccagtgcagcaaaagcatgtgtgtattctctagcgcgttgtaatcacaatgtaaagagcagttttgttagtgttgttctctgccccgaagaacaaatgtgtgaccagtgtggatgtagactacactcagcactgaaggaacaaaaccggaagagatcccagttctgtttaactcttttgtgtttgaaacttgtttaaatcaaggggtggtgtgatttacagcaaactaaaatggctggcgcctctgaaataaagggttggtagggtcttcagggctgtccccacctcttggtagttcatggtatttacacactgttccagaaagtgggggagcaaacactataggcatttggcttcataaaatgccagttccctgaaaatacaagtggccaaccacatggaaagaatttcagatcataggtgagtggtggaacaagctcccagtgccaggcacgccttacacattttctcaacacactagtgctatggcacctgctgcgggaactagacatgccggacaagtagccaagtgttgttgccagctctgataacacctcatttggagtagagaaaggaactggggcctggagtgtgttcattccctcctccaatgtgaacagtggtaagtgtcagtaaaatgtccttggtgtttacacacatgcacactagtgctaccttttctgggtcttcaggaatgactctcctaataatcctcaaagggacggaagagataatacatatatatgaatatccagcacaaattagtggacaccctgtaaaccttcccttttactgatataaattacaaggaagcacttgttcctctccgcatttctgaaatccagatgcttctcatagtcaccctggcagctgtcacaatgtagctgtcatcacgcacaccacagaccagagttgcagaatgagtgtcattggtttgcaggagagtcccagagacattcgctgagcacagaacactgcctttcagacactcttgatggcgtgcagatgtgagaaagtgtagattttgacagctcaggactacagagtagcccagaagaattagactcttgaaaagttatagggctctcctctgcaccttattatagtttttgtggttcagagagtgataccttgagaacttctaagtaaatctaaaaacagtattcaagtagtgaaataaactcctgtctccgggcttttccctaatgagaagtgaagtaaatgtgccttttaagagatggcatcttagggtcaaaggagctcagttgccgcacatgtcattccttcttatctgtgatgctcttgagagggtaaatttgctgttaaatgtcaagcgcatgtgtggcagtgtgctactggcctcaagagctatttgtagcaatgtgctaactggccagtgttcttgcttcatagccactgacttagtggctcctgagaggcaggcactgtgttcagagctgtaaatactcggtgggcaaagccagtctcttccttaacaaagcgtatgtgctagagaaaatgctgagagttcctggcaggtgacagatgttgaaaaagtaatatttggggcataatgtcacagacctgtgatccttctacttggaaggtagagtcaggagggtcaggagttcaccgttgttttctgctgcatagagagtttggggctagccttgggtacaactggaagaatgggaaagaaagaaaaagaaaagtaacaggaacaggaaggctggagagatgggtcagtgttaacagcactgactgctcttccagaggtcctgagttcaaatcccagcaaccacatggtggctcacaaccatctgtaatggggatctgatgccctcttctggtgtgtctgaagacagcgacagtgtactcacatatatgaaattagagagtgggggagggggacaggaaggggaaggagaagaggaaaaagaaagggaaaagaatgaaaactagatgaacgtgccagtgagtaatggggctagtatgcatgtcaggctattcaggaaggcctctgataaatgagaattaaacagggcctcacaggaaataagggagcagtcttaatatgatcacaactcaatgtcaaactgtagttgcacagaggacagcatcagcagccttgatgctggagtgcggctcactgaagcacagaagcaagataggactagactggaaccagagagagaggaaaaaggagaaagaggatggctgccgtctttttcagctagtgctgctatgagtctgtgttaccggtggctgcccttgtaggaggagcagggtctcagagcttggatctctgcatgccagctgcaggctctcccacatggaagcagcaaggcctgttaatgggtaatgagaactttcaagatgagagatgttgttgtgatagttgcacatcaagataagcaggtgatgccatcctaaccatggtattgaaattataagtaaatccaaacaagacagcaaagtaagatgtattctgtaaatgtgatagttttgtgcccatctcttagaaggctttacacatggaacactacaaaataacttttcctgaagaagagcaagccttgcttgtcttcctgctactagagaggttaaagtagaagaagcatttgagtccacacttcaagatcagcccaggtaacacagtgaaaccccaagccaaacaagaaaatcaatcnnnnnnnnnnnnnnnnnnnnnnnnnnnnnnnnnnnnnnnnnnnnnnnnnnnnnnnnnnnnnnnnnnnnnnnnnnnnnnnnnnnnnnnnnnnnnnnnnnnnnnnnnncctccctccctctttctttctttctttctttctttctttctttctttctttctttctttctttctttctttctttcttccctccctttccttttttctttacctcccccctctatgtcttccttattccccttttctctcccctacttcctctttctctccacagaagagaagctatgaaatgtcatctctgggacattctagttagagaaataaatcagatttgctgtaacagtttaaagcattctatgattaaggatcaaatgtcagtgagttagagttgagaaaaggaaaagattgcagtggcttggtatctcatacatacacaaaccatcagagagataagagcaggagtaggaacaagcaataagagagcaagaaaaaatggctggggctggaaaagttctacagaggagtttgaagacaaaactaagaaaatatgagggctggagagatggctcagtggttaagagcactgcctgctcttccaaaggtcctgagttcaattcccagcaacccacaagcatctgtaatgggatgtggtgtactcttctggtatgtatctgaagcagctacagtgtactcataaaaataaaaataaataaaatcttaaaaaaagaaaataaagaaaatctgagcactgggcataaagagaagactaacaggggacacagtgtcagaaaacacagaattaatttatgtggttctacagccaactggaaggatgtccaggaagagaaacccaatgaaacccaagaatataaaattgtcaaagaagtgatacaagaaaattctcagtattaaaagatactgaaagaggcttaagggcacttcaattatgaaggaatgcaaatgaatacgaaggtatgttgtacctaccacagtaaacagttgggagtaaacagttgggagctgcaaaggcatggaacttgatagagaatatgaagcagtagagatgcccatgcccatccatgagaggtggctttcaccatgtccgggtgaaggcaacttgcactaaggcttgtgataaacacatggccaaggctgcttacaggaggaagagtttacttgtgcttatggggatgagagtccactgtggcaccaggcaacaagcaaagctgacaactcacatcttgagcctcaagcaggaagaggaaagagtgaactagcagtggctgagtctttaaacactcaagctcacctcctgtgtcacccttcctccaacaaggccgcaccttctgagccttcccaagtagcaccatcaactaggaaccaccatttaaatccccaagactgcagagcatttctcatttaaaccaccacagctggccatgattgggatatttgtagtgagattcacataccagtagtaaatgtcctgatctcttaggtagcataagtgagaagtcattaggaagtgcctaaaatctctacagcacacatgtttacaaaaactagcctaagcaaaaacctctgaggcaatgttgaagtttgcttttggagggatatcctcattttatgatgtttgcacactctccttctggatagtttcctgtgacagaaatatttttttcttcagtattagtttctttcaatctcaatttgtcaaatatctccacttccaatgagtctggcttatcatataccatgtgttaaagaaatcttccagggtcatgcaaggctgtcactgagctaacatcgagttgaggttcctgaggcacattcctgaggaatgagaagacatcagagattagcagaaggagtgcagttcagaatgtgggggttgggtgggaggtggagaagaggacaggggacaggaagaagacagtgggaccataccatcagaatgtaaaataaaggaatgtcagcctgaagtcctgtcttcagccaacctgtcaactcaggaggtagcatatggacatttcagacacacagcgtctgaaaacattcacttcccaagcatctcttccccaaaactatcagatgatatggtctaaattcagctggatctagtagatagttcagcacccagtatatacctaatgtgaccccatgcatccagtaactgtcttgtacttatagatctgagctgaaagattcagaaaacaaagatgaattaaaacccaggctttgctctcgataacttcgcatttactaatctgggacaaagcagacaaatagctgtatgctcaagtgttctcataaagttagcagatttgtaggaatttgtgacggtaatagctcagatctgactggaggtgtggcttcatacgaactgtttggggtatttttcataaaataaatcaagttttcacaaccatgtatgaagagcaaagtgtagtcagtacaaaatgtaactagaatgtcatggaaacctccagacattaagtaccgtgggctgccagagtgcagtgcagggaggctggaagaaaggaatgaaggccatgtccaggctccagcactggactggactggactgggctgggctgggatgtccacccttagctcctgaggctggacagacttactgggagataactagaatgaggctttttctaaagaatctttcaaactggctgtgctttgcctaccaggtggaatcactgctgacttgaatgtatttttgtctttggcccctccctgattgcttggcatggaattatgcacatagtaaatgtttgttgtgttgaacttatgctattagagaattcaagaaagaggaagtgtcttagggtttcgctgctgtgaagaaacattaccatggcaactcattaaggaaaacatttcattggaggttgcttacagaggttcagtccattctcatcatggagaggagcaggacagcatgcaggcagacttggtgctggaggagctgagacttctacattttgatctgcaggctgctagcagaatattggcttccaggtagctaggatgagagtcttaaagcccacacccacagtgacacacccactccaacaaggccacacctcctaatagtgctattccctatgggccaaccattcaagcacattgctctatggtggtgatacgtattcaaatcaccacaggaagggtgatctagtacttgttggctagagaataagtaggatattgagttgctagctattagaaataaaactccagggcagtgacacacctttgtaattttgcacttgggagactgaagtaggaaagtcaggagttcaaaaccagcctggggtcagtagtacatgaaacattgaggagtaggggtacatgctgtgaacatgaaatcctggtgctcaaggagtctgaggcaacatgatcagcctttgcaaaaaagcaaaagaaaagaggaggaaggagggaggagatacagtatagaagaccatggaaaagtatttcagaccgagactggggcaggaccaatagttaaagagtttaagagtgaatgggtgggggactggagagatggctcagcggttaagaacactgactgctcttccataggtcctgagttcagttcccagcaaccgcatggtggctcacaaccatctgtaatgggatccctggtgtgtctgaagatagctacagcataaagatatacatacatacataagagtgggtgggtgataaagtgatcaggccagtgtgatatttcatcagtgtgacagaactgaagtgtgtctttttctctgattgtcacactatgttctgagcatcctaggtcgcctttctgctttattgatgttcaagtggctctgaatacttttcctatgactatgttcattgggaaaaatagcagattctcaaataatgaactagaaatgcttctaggaggactcactatgtgctcgagctagacaacagtgttgaggaatggaaaggcttggataaagcagcccacttttacagttaggagttctagggaagcattgagcatgcgcatcagcagcagagaagacactactctgctgggtctagcactattctgctttcttaaattaagaaaactattactttggagcactttgggggtggtaattagttcatttcagttacttcctgtcatgtcccccctaagtgtcaaacagagtacagcttcaaggagtcaggattgtttgtcctatggtcagtttcttgctccacaagtagagagtcatgtgttccacttcactgatatgtcaggagatgacaggctgacattttcattaagctttataatgttctattagttatgttggacgaagtctttccaagagtcccaggaaatctagcagtcatctgtagcagtatataagtccttttttgtagctttcagtgagctgcatagaatgtgcttaaaatattatttacctgaaaagatacttgaggtaaacatttatgaaatacactttaaccctcgagctttaactaaatttcaccgggatttgtgtaggaattccctctgatccaattcccttttatacaattgaacctgctatgtgttgagcctaggtaatttctgaaaggccagaatgccatccttcctcttgtcccagtacaaggaacgttccgacttcttaacttcttaactcctcccctgccccacacagcatgggcctttctaacaaagctgcaggttttctgcattgcttttttgctcccaatcataactataaacccagctcaaggtagctgcagtaactccacagagcagattaatgaatccaccacctcagtcctctcagagcgtcaggacacaggtgaaagacaaatgccagagtgtgacatgaattctagtccagttcccaacagaactgaagcctcacgggcactgtcttcactgctcctgtctttgttggcatcccaatcttctgagtctattgatccaaacttcctagtttcccctccagcccgcttccaaacccttaagaactttgtgactaaggttagttgtagccacaatgaaacttttccagtagcagttttcagcattggctggatccttacagtgacatagacaacataaaggagccttgtttaggttagttaggagctgcctaggctctagtccgccatggatggaagggagtgatggtccagaggagtgagcatgtggcagaggctgctcacctcagacagacagtaagctgagagaaagaggctccagaggcctagcactggacctcctaaagtctacacctcccacaatattgtcaccagctgaggccaaccattcaacacaagggcctgagggggacatttctctttcaaactattacaatagagttctttgtgcactgaaaatagggttttcttgttctgtctgcagttaatatgtgtaagaggaagaatggaaaattgtcaatctgtttataaagtagactttggaaattttcactcatttcttaaaattttgagtgtggggtgtttggggggaatattggggagagagaaactaacttgtttaggcacagttgtcagttttatttttgacttactgctttggataaacatactggaatgctgccaacatttcaggtggctgagtgctaattttgtagaaattagatggaagagctattcctgccaattttccattaaattatgcaaaaatttgactttgtaagacataaatctagtttttaaaaaaaagagtcctaattttctagttagtaagaccatcaaaagactaattattctcattttagcttttgatttttgtttaggaaaaatatcaaagaagcaaaatgcagtaaaaattagtgcttccttttgtcatgtagccagcatgtagacttaaggtgttaaaggatgtagcgtttgtgactttttcttacgaagccagtgagctcagaaaacaatgacttttctctcgatgagtagtagttactgagtaatcactcacgtagtggtcagggctatctttcagctaatcctcaagtgatggaattggtatatctctgatttttctcttagccttcccaggcttagaaggaggagacaaaagtgattgtgggaactagagggagccctggaggccacagaggaaaggagacgttatcttaagcaattaatcaaggaactcatattatgggacaattattcacagttaattttaaaataactttaaagcccaggtcttgagggatttttttccctccaaattttgtcaaggtcattgagacagtgttaggctcaggtgccgcacagacattgcatccgtgagtgggcacattgtgaagaagtactggcaggcagcatcagtatgtgtaggactttacttccatcctgatagctagctgttcaaatagaatggagatagcctttctccaaggggattctgaggtgccctggcctctgccctctgccctctgctctctgttcaacctgtgggagttggtggctcctcattcttgtttagtgactttgtgtctatgtcgtatcatctaatgctagatttccagctggctgtggttgttcagtctgaccaatcagctcaccttgttgagacttgaacacaggtaggttcatatgccttatctgatagtttctcttgttcacagagaagtgagcactcgaagatctgctctcagcttcctctgccctcctcctgggtgttttttccttcccgcagtgacagtgcactgctgctgctgcccagtggctcctgtaggctggaggcactctctgggtagctgcttcccttctacacaggccccagccaatgctgacactggcaccacagtgagacttttaccctctgtctttcttccctggcatgtctgttcaattgtcacccagggtcacgttttacttgtctggtgacagctgtggcatcacttctttggtgattctgtcaccagcctgtctctctccacatccactgccctattttattggcttcctagctcttaatcactgtgaattagcctcggtgtttatttgttacctcggctctcctagtaaatctgtgagaacagagcccttgcgctctgtggacttggctctaaatagcaaggctctcttacacagatgttgtctgggaaagatcaaatctcaaaacccagagtctgccttctcctgaacgcttctcagttgtggaccatcgtaaggtggaggaataagctcgaccaacatcacttgggaccccttgtagatattgtcatgcttaacagctgatagtgaagctagttcctgactctgagtcttagttagggaaacagacaggaatgacatccatgttcagacagttgtaattatttttacagtcttataatgtctgaaaaatacccagaaaagactatgttaagcttgagctttgcagaataagagagaagcagacccagctgagagacgagtgttctccgggagaaagacagaacataaaagacctcaacatgttccagaattgggaaaaaaaaaatcatgtggtttgagcagggtgatcggtatgaatattctgtaacaatctaaaatgtatctctgcttgaatttggagaaacgtctaagataggtaagccaggtatgtcaccattaagtgtgtaatggttgattttagttttaattttcaactagatagaacctgcagtcacctcggagacaggcttctagactcacctgtgggggatatttcgattgtgttgattaaaataggcagacccacgcactgtgggcggtaccattccccaggcagggcctcctggactgtgtaaggatggagagcgtgagctaagcaggagcatgcctgcatccatcactcgtcttactgagcagctgctgcaagctccagatgtcttaccttccccatcctgatgactgtaacctggaactgtaaactaaaataaagccttcctcccttaagttgctttggttggagttgctttctcaaagtaacagaaaaggtgtatgaagcatattttttctttctatgaaatgtgtatgggaaatgtgattgcttttgagtaattcgcctttgtttcaatcagtagttcatacatacaagtgcgatggagtgagtcatattcctacaagcagttggtctttacttgaaaattgtgttttcatgtatttgcctactcactacagccacttttaaccccagaatgctcagtgacattccaagataacctgggtacgtgtgcaaaatgccaaaaaaaaaaaaaaatttacttattggggctgaagagatggctcagcagttaagaatactggctactgttccaagggacccagaactgattcccaacacctacatgactgctgacaaccgtctatacctccagttttcaggatctgatgcttgctcgcttctagcttctgggggaagaaggcacacatgtggtgcacaaacatagagactgccaaaacacccatacacttaacataataaataaattatttttaagtattgacgtccctgtcccttgagttgcagactgcttttgaccttctttctgctttcactgaacaagtgtctgttgacgtcctacgccctagtagagtcctgcattccacctactgtccttgagcacaaaggctatgacatgccttgcagaaagtatgcctagatttaatatccttctgtgaagcccaggttatacttctgttaaccaggagtgcagggttactcaccagtgtgtattaagtcaggtccttaaatgaactgcatgtagctggacatgttctttatgccatcactcggggctgaggatggaggggaggtccatccagcaggaaagggaaggcgaggaggaggaggaggaggaggctgtaaagggaagggaagagaaagggaagggaagcacagaagacaagatcatacagtgatcatttgatgaaaatgtggccagagagtcacaggaactgaattctgggttttccctagaaacagtacttacagcagatcaataaaagtgatgacagctgattgtgtatgttagtgtggatacacagttaacatgttggtaatgagagctgactatgcacatatgtgtaaatatgtagttaaaatgttgcttcattgaacctgaaaatttactgtatttagacagcaactctattactcacaatgttgcaatttgatagttaggccaggctggcccaaatatagaattctactggatgtggctaggctaactcaaatcattgtggtcagctagtgatcaatggcctcccttccatttctgatgctttggctagtgccctaggctctgctgttctcaccatccatcaagcaagagggatagctagctccagagtaagaagtgctttccaagcctctgtctgtgttacatctgccaaccttgacccctgactggctgtgcaaatcagatggccacccagactcaagtagtcgtctgccctgattagcattgtattggccattgatgcatttgtggaggggaagaacctctgttgttccttacagttagtcgagtttatgaattaaacacttgactggattctctttttaaagactgttttgtttttgggggaagagggaaggtcagaggacaacttctggagttgattttctcctactctgagttccaggagactccaggttgctgtgcttgcatgtcaagccattttacttgctgagccatttggctattttcattgttgttttgtttttttcctatgctttgttttactgttactcaaaagctgcataggtgctactttctttgagcccagacttgtcagaaaaggaagtagttcagaaagatgaggaggccacacagccagcaatgggcaaagactttaacccatgtctgttgtgactgcaagatggttattctttctccactactttgctttctgatagatgaatagctaattggtcttgttgggctgaggaacagccattaaataggctctatgaatccagaagaaacaactgccattttttgtcttggagaaactgtgccctgtgggcagccttcctgtgtgacaagtttaagtaaattgtgacggcagtgagtggagatggggtgcttgattcacatcaagggcttacattctgtatatgggatcttagttgtagcaaaatttattctgaaagacttaaaggaagatgattaaaatattagagatactgacattgtctgaagagatctacttgtatttatttcttgtaaaaaaaaatccacaatattaccatagctgggcctattatgctattgtaatcctagctgaacagagaagggtgattaacgatagcaatttattgtatctgaggaggaaagaaaataggagatgttgtcgttatcataaatcatatcataaataaccaaaaagaagtcctcggaaagcctgtgtggtgtcagcagccagcgctttcaggcccgttagccaggatgtagccatagaaaccccaaagtcatattgttatcttggtcttgctgcagttatgtgatacaacagtattaacatatagattaggccatttataatgctaggtgtcatttcaggttggcttgcttatatcgcattttagtttcttattgtgcagaatgttagtggaatggggcttttttacatgtcagtgtgtgtaggtatttatagcacatcttcactattgctaatttatcctgtcattgattggctgtactctatgaattgtcattgcctaattgtcttcattagtaatattttcaagtaagtaggtttatttttaaaaatacatgcccacttgtacatattgagtgttaaaagggttctgattttgattcaattgcaaacaggacagtttaaaaaatattatatgtcacaattaaaactgtttagcctcaggctaaaggataaactgttgagatggattagtcagtttggctgtcactgcacctcttgtcccctctaccccccaggctcccagtgtctgtcttgctcttgctgtcccaggctccttccctgcagcagtacctcccctgagcctgatcttccagcaacaccgtgtgttccaaacccatttaaccatcactgtccgtcagattgtttcagttgtgtgccatcttctcatcctcttggcccccaaagtaggctcacagcttttcttagcttctttgtccttagatattttggcaggaacagtttaaagtcatggcctttctccaaagccaaaatgaagtatctgcagttctaagtaccagtctgggttttcagtggcctacctaggatcaggacctgctgcgctgggtcttggggacattaaatgggctctgctgggttcagttgtggccatggggaaaaaacccagctgcagtttcagcacggttccatttctaattagcatttccatgtccactcccttccgacctctgcatgtcccttgttcagatctctgctgtgccacaccaagaactgtctacaaggatacaggtgattctgaaggtgggagactggggtttgctcgtcaggtcttgtgcccaagtctagcacagtactatgtatggtgacacacagcagcagataatgcatcattgagtcacttgtaggaatttgtgaagataagtgcatctaagaccccaacaaatgtgaaggtagcttcactggggaaaaaggaaataataattttactgataaaggtaagatcagcataccccttaatgccataacttagaagactaaggcagaagattaccagtttgagaccagcctaggcaacctaacaagaaccaatctaaaatttaaaaagtttccacacaagtaatgtagctttcaatgtatttaatttggggggaatatatgtgagtggcactttattgtcctgttagttaaagtttaaaaatagaagtgtgttttctgcctagtttgagaacacgccactgaagttaagagttgcatgcatctgtgcagttaatgagataaaaagctttcatgccatgtgcaaacaatttcctcttcttcctaatgtctactagctttttagattacagtgtttctttaaaggcatttactgttctagttaaaacgatattttgttctaagtcaatatttattatagcttagaattaacatccccaaatccttatggtgtgttcagacctcactgccgtgtttagtttttgtttgagaggtttggtagggcagcatgtttttttcattattcctcagagtaatgtagggactggtgattatttatgttgtcaacgaaggaaaatcacagtgaagtttgtactgtcctgccctcttcaacatttgtgattttaaaaaggtggactttgctgttgtttgtgttttccttttgtgtaatttaagagactttgtgcccagtcatccatattgtttcctattatttcctcctgtaatgctgctgcaaaagcattccagatgtgttagtcagtcactgtaacaaatgcttccgtaaggaacagaaaagacaggcttcgttttgctcacattagaggtttctctggattggttgactctgttgctttcagcctgtggcagagcagtcatgctgggagcacatagcagagcagacctgctgacctcatgacccacgaaacaaaagcagaaaatacagacacataagagtccacatttcctttagagagcacccctccaggacttaaaaacctgccatgggccctgcttcatgacgctcccaccacctcctaaaataggaagttgaggccatcccctaacatggagttcttagggacaattaagaccctactgtgtcagcacacatgggaaactatttggcagaatgaaaagttcctctgtgttctcattatgtcagggtttctctgtgttccctagctgtgctggagctcactttgtagaccaggctgaccttgaactcagagatctggctgcctctgctgcttgagtcctgggattaagggcgtgtaccaccacgcccagctctaggctatcttttttgcgtgtgtgaccagttgaacccacaggggatgtactcacaagttgaggtaggagggaaaatggacaaagaaatggtctgaaatgactccgtgtgtctactggccactggagaggtggtggtggcattgtcaggcaatggtagcagtagttggtgaagctccatgttgtgactgtttataaagcgctgtctgtcactttcatcatctcacctattcacctgatgcatttgaagcccagcgtctgtcagctttcattctcacggatctctgagcaatgactttgtccactaggcttccatttgttaaaaccaaaaacctttacattgttttcatttgtttagtgtgtgtgtgtgtgtgtgtgtgtgtgtgtgtgtgtgtgtgtatgctccacaatatgcatgaagaagccagaagaaaacccgtgacatgagttctttacttcagtcatgtgggccccaagactcaggcgcaggttatctgtcttgatggcaagnnnnnnnnnnnnnnnnnnnncctttaccactgagctctcttgctctaaactttctttttttttttttttaaatattttcttttattacgtattttcctcaattacatttccaattctatcccaaaagtcccccataccctccccccacccccctacccacccactcccactttttggccctggcgttcccctgtactgaggcatataaagtttgcacgaccaatgggcctctctttccagtgatggccgactaggccatcttctgatacatatgcagctagagtcttgagctccgggatactggttagttcataatgttgttccacctatagggttgcagatccctttagctccttggatactttctctagctcctccattgggggccctgtgatccatccaatagctgactgtgagcatccacttctgtgtttgctaggccctggctctaaactttcttatcacagctcccggatcccttgagctctttgacacctgaccctccatgtttcattgttccctttatctttacatcgttattcctcagaattctgaatccacgtttcatattttaccccactcctcaaccgtggtttcagtattaacaacagcctctcatatcccactctggtttttggaacttcagcatatttttgagctgctcagtcaacaccactggctaagtgttgctcaagctttgtgtctgggatagagctaaaaatcatcattactctccattcgccttcctgttaacgacggccttgggcttgtgttagactccaagtcatatctgagcgtgtagtgtctgctcactgtctaaagaatgtcatccacctctcctgattcctgtctgctgccattttctagtctagtctcttcactcttgcctacactgtgttagccatacccctcatctgtccctccttttggtgtctggcaccacccactctgtctaccatgtgttttgttgaggtagtcttgggcatacttgagtgtaaagtagcagagtacagaagcctcgtgacgtgggtacaaccttactcagctttcacttattctgcctttctcctcctcacattccagacaaagtattcctgtgtctcaagtcctcctttttaccacctgagcctttcatcctgtactctggcactcctggcaatattctaatcactgcattattcctgaagtctcccccgtggacagcgactcgtccccttgtgctttgaactcctggacaatttgtctggggtaccagttacctttctgtgtgccatacacacgcactagtgtaggtcaggagttgattgtatagttctttcaggcattctcatcatgcagtatatgcttactgaatatgtacagaacagaaagacaagctggtcttataaggactaagtcaaataggcaaggcaagtgtatcagctccttttgaaaggtcaggaaacttgctcaaggaggttcagattgcctaaggcccatcattctgtagggccagacactaactaaacatagtttcagatatctgatccaagttcctcacactgtactatgctgtcattccaggggtgggtnnnnnnnnnnnnnnnnnnnnnnnnnnnnnnnnnnnnnnnnnnnnnnnnnnnnnnnnnnnnnnnnnnnnnnnnnnnnnnnnnnnnnnnnnnnnnnnnnnnnnnnnnnnnnnnnnnnnnnnnnnnnnnnnnnnnnnnnnnnnnnnnnnnnnnnnnnnnnnnnnnnnnnnnnnnnnnnnnnnnnnnnnnnnnnnnnnnnnnnnnnnnnnnnnnnnnnnnnnnnnnnnnnnnnnnnnnnnnnnnnnnnnnnnnnnnnnnnnnnnnnnnnnnnnnnnnnnnnnnnnnnnnnnnnnnnnnnnnnnnnnnnnnnnnnnnnnnnnnnnnnnnnnnnnnnnnnnnnnnnnnnnnnnnnnnnnnnnnnnnnnnnnnncataagcgtcttttaaaagtgtgcctttcatttccgagattagcggtcatgaacactgctgtgtttctgaggccatgtgagtgttggaaggagcgagaggagcacagaataggaggtcacactggtcctctgtgtggccgtttgtgaaaggatgaagagcctaggctgggaagacctgggagggctcgttgctttgtgttctgaactttgtttctcccttccaagaagtgatgtttgaagactaggttctgtttgttgtatccattctaatagtgcccttttcaccctttgcagaggaggaagaggaacaggtgcccactgatgggggcacctcagcagaagccatgcaggtgcccttggaagaagatgatgagatggaggaggaggaagtcatcaatgatgagaacttcttgggtaagaggccactggacagtcctgaagtggaagaaatgccctccatgaagcgcccacgactcctgagcactaaaggggactccctagatgttgtgttgttagaagcacgagaacccctcagctctataaacccacagaagaccccaccagtgctctctcctgtgcgtgtccaggacagggctgatctggcccctccatcaccacagcctcccatgctggctccatttgcaaagtcacaactaccaattgcaaagccgttagaaacaaagtcgtttacaccaaaaacaaagactaaagctagctctccaggtcagaaaactaagtcacccaaggctgccctatcaccagcaaggcttggaagtcctattcggtcaccaaaaaccatcccaaaagaaaagaagtcacctggacgctccaagagccccaagagtcctaagagccccaagattgtagctcatgttccccaaacccctgtcagacctgaaacaccaaataggaccccttcagccatggtggttgaaaaaactgttaaagagaccatcccagtgatgaaaccaacacagactcccccagaagttgtgaaactgaacattgaaatgcagccgaaaaagcctgtggtgacagacaaaaccatcgatgactccatcgatgctgtgatcgcacgtgcctgtgcagagcgggagccagaccctttcgagttttcttccggatcggaatcggaaggagacacttttacaagtcctaagaggatttcaggctcagagtgcgccactccaaaagcctccacttcctccaataacttcaccaagtccctggccactcctctgcctctctccagcggaacctcaagttcagataactcgtggacaatggatgcctctattgatgaggtggtacggaaggcaaagctgggagccccttccaacatgcctcccaccttcccatatatctcttctccctcaatttctcctcccactcctgagcctctacacaaggggtatgaggagaaagccaagctgccttcgtctgtggatgtaaagaaaaagttgaaaaaagaactgaagactaagttgaaaaagaaagaaaagcagcgagacagagagagggagagagagagaaacaaagaaagaagcaaagagaaagataaaatgagagagagggagaaggagaaggaggctggaaaggaacttaagtacccgtggagggagctgatgaaagacgaagattctgatccctataagtttaaaatcaaagaatttgaagacattgatgctgcgaaagtgcgattgaaagatgggatcgtgaggagagagcgagagaaacataaggacaagaagaaagatcgagaaagaagcaagcgggagaaagataagcgagaaagggaaaggcttaaagaaaaaaacagagaagacaagataaaggcccctccaacacagctggtgttgcccccaaaagaaatggcactgcctttgttcagcccttcagcagtgagggtcccggccatgctgccggccttctcaccaatgctcccagaaaaactgtttgaggaaaaagagaagcccaaggagaaagaaaggaaaaaggacaaaaaggagaagaagaagaagaaagagaaggagaaagaaaaggagaagaaagagagggagagggagaaggagagaagggagagagagaagagagagaaggagaaggagaagcacaaacatgagaaggtaagctgggtgtcattttcacagtctgaacaaggccttagtgcaaaccgcaggtaaacgcagccagggcttagagctgggttttggatgtaaatcgaggggcagttaggtgacatttatttgtaatgtggttacaaagatcaaatttagttctgtaactaagccctatacacgctagatgctaaaaatgcatagatagcttcagaggaatgtaatcaaaagctgtaaattctgtgttcattaagctgatatctcacagttaaaacacgcacacacagtaagaccatttttttaaaaatatcaggtctactgctacatgatgttttgtactgtttttttgggtacccaaaagcatccatttttctatgacatgtaaacctatgttccttctggaagaagacaggaagccaacaaggggctgatggcctttgtctccttttggagatccactctgccatttacttagggcagaggctgcacgtaggacttgagcagcttctcttattcttgctacttctcatggtaagattggaactcctgggctaatttggtgatccagctaacagacagaaagtaacttcatatacagagatcttgcctgtcaagtcaggaaagcagacttgcagagtccttgtaaacaacagggatattggtcagccctgcagtttcatcagagtcagagctgtgtcctgtggacacaagttgtgacctctgttcggacagctctcctcttcctcttagtcttgagatgattgcagacattcacttgaccctcagggccatctgtagagcttcagagtctcctactcacacgggatcttctctgtctgcacttggccacaaaatagcagcagaagtttctctccacataatgaatgctgtcctacctaacagcaaatacagtaccaataatgttacaatgcttttagcttccaacttacctggaaaagctaacttggctggcaacagccacttttttttctgcctaactcttaatttgtttagaccccttgctgtttccatgagtaaagaaatggaatgaaaatgatgtcagtaattggacactggcaaagtaatgagacaccattaatttactaacaggacaccaactctataatttgtctcattctaaaagatttattttatttttatttttactactgtagaaagcaatgtgtccagaagaggatgttagactccctggagctagagttgtaggttgttgtaagctgggaactgaactcaggtcctctggaagtgcagtcagtatgagtgctctgaactactgaaccatttctccagcataccgtatgtctgtctttacagtcatgttatcatttaactactatgctatcttaatatggtacttgtcaggttttgaagcacttccacacatttcccctcttctgacatacctatgacccagatccagcaggtattatcaacactaggaaacaagagacagcctaggagactggcctgtcccagttgagaggcacacattcacactagccaaatccctattccacagatagtcttcaaatttggaaatattttcatagaaacattgtctgacaataattagtcatcactgttgtgtaactagagtaacaggctgactcgcagccaagcaaacgtggtgccattgcatctggtaccaccttaactttgggaagtcatgcattgtggagcagccattatgagtcctaatgaagcccatccaatgaaggtgttaacatcaggcagaccatgcctgtgcctttgctcaggatctccctgactctggagaagaaaacccctcaggaagacacttacataccaatagctagacagactattgcctgatagacgggttcaagccttgtgttatttttgataggctatagatcagagaaatgacaaaatataaaaatttatcaaaatcccttaccttacaagaagtttacaaatgagaaataggattgtagaattagacttgagttctaatcctagcttctgtgaaattgcttatatgaaaataaaatcaggctgttatacaagatatgtataggaatatgtctggcatatgtggaacaagacacagcctaggagactggcctatcccagtaaatattatttgagtaatgaaaatggttacaggaatagtaatagtgttctattattatttgaactacactataaacgtgtagaaacctagagttaaatcttagtcctttgtaaaaacggaaagggaagaggtgttatcacttgtggagagcagtaataaggagtagagattaaaggctggtataacatggaagtgtctctttactctacccaccaatctgcgcaagtttcatgtaaaacaagtcagcaacaacaaacctgaaataggactgtgtatgccctgcagatgtccttaattgtttttagtagaaagatagtaaaagtaagcaaatgggtcagcaggatgtccaatagggaaggcacttgctgccaaacatggcatcctgaatgcaaaactatatggtgaaaggagagctcctgcttcccacaagctggcctctgacctacacgtacatgcctcactcagcccatgctgacccacacatatacataaagcaaatacatacatgcatacatacatacctagatgcaaaaagcctatttgtgtgtgctcacacagcgcgtgttacaaggcttgattatttcaaacgatgaattgttggaattaggtagatgtgaaggattaccttaactacatcaattttagtattttaagtgtgtttcatagaaaaatgataacaaaaaaggaaactctttgttatttgtgatggtgaaacgaggtatctgtgtgcatacatgcatgcatgtgcatgttcataatgctggggtttggagccaggcccgaggtatctgtgtgcatacatgcatgcatgtgcatgttcataatgctggggtttggagccaggcccgaggtatctgtgtgcatacatgcatgcgtgtgcatgttcataatgctggggtttggagccaggcccgaggtatctgtgtgcatacatgcatgcgtgtgcatgttcataatgctggggtttggagccaggcccctcgtgtatactgagcttcctaccatgaactgtgcctataactacctgtaatgttaaacaggagagaaagcagacactgaggactacatattcttgtatttcagtatattcttacctgagtacactcttaatggcagtgtcactccaaaaggatggcattaccatctgcagataaatagacacaacctaggcccacagcaatttttggaagctgggctttggcagtgatctggtaggtatcccaaccctaccactgcctggccatcatgatcctctcgtatcttttggggtctttgcttccttccttacctctgtctccacctcacattcattttgggaagagacagcatcactccgcccatttacttctgtttaaaaccagctttggaggcaggactgtagctcagttgttagagcacttgcctagtgttccaagctctggctctgttccacagcactgcatcaattaggcattgcagcccctgcccttaggcttaacaatcagtaggtagaggcttcaggtcatccttgcttccatagtctatttgaagccagactgggacatgagaccttgtctcaaaacaagcaaacagccagggctgcacagagaaaccttgtctcggaaaaaaaaaccaagcaaacaaagaaaacaatgtttgtttcataccttctgtaagaatactcaccgtgaaagccacccccatagaaaatgctgagcaaacactggtttatgttatttaaaatgtgtagatgactgacagtttggaatgttcttacaaataactagcaatgttgatcacccatggataattaaaagaaaaattttttatgctgaaaaacttatggactttaaaaagaatactcaaactttgacctgactaataaattgtctgatttgagctacaatggctatttatgaatgggctaacctagataggagtgatgctgtcacctgagagtatatttgtgtggcaggctactccatgagttaatcctccagaccgctctgtggctttgatattgctgattctgcagttcagaaagttgtgtactgagaggtctgagtgacaaccccagtgaggggagactgatgtggttaggcccatccaaccacatcccgtgtccttgctactcaagcagcctgctcacgttagtctctctccactctggcatgtccaggacacaggatgctcctgaacaggacagtagaaaggctaattaggggtgaggtgaccagaagggctggtgaaatgtcagtccttgaagaaaccttatgagctcctgtttaactttctatatttaaaaacaggaaagtgatgacctcagagcctggtgactttagtaatcagaactatgaaacattttaatgactctttcatttgtccgcaagccctttagtatctgcctgcaaatcaccactgcctcagttagacagtgtaatacaacagagaatcactcttacttttttcttttacacaacagcatgtctccttccttccttccttccttcctccctccctccctcactccctccctccctcctttcctttctttcttcttatttaaaacatttggtcagccgggcatggtggcgcatgcctttaatcccagcacttgggaggcagaggcaggcggatttctgagttcaagaccagcctggtctacagagtgagttccaggacaaccagggctacacaaagaagccctgtctcgaaaaagcaaaacaaaaacaaaaataaacaaaaaaaaaacagcttggtcttatttctagtctttcctcattgcttgtcatacatagtgaaatgaagggtttgcaataaacaaagtaccgcagtaaaataggggaaatgttccctccctgtttctcagcactgcctcttccttgaagtccggaatgtaagcagcatttaggtgagtgggtttgaatttgtatacagctactgcaggctgcgcccatccatcctcctatgaatgggcttggatgggagcttgctgtccacactggacagcattcactccattcagccacagccaggcctctacagactgtcttctgaatgtttcaaatagctgatggggattttgttagcctgcttcaaaaaggagcacatgtaaagagcttaattgccgagaaggacagcacagggttaccaaccaccatgagcaccatgagtgctaagtgctcccatgtggcttccttcaggagtggtgcagggtggacaccgaaactagctcctgcccgcccggcttacccaagccagtgcacacacatgctagaggctcttcactcttttttttttttttttttttttttgtgaaaggagtttaacattaaaaaaataaataaataaacttggacagattaaattgacaaagctgcccattacctttgtagaaagtccctgtcaaaagataaactttaaagctggaacgcatgaaagggttccaagatagaatttaaatttaaactgattctttagagataagctttttaaaaatccacctctttgcttcaagtcaggattttaaaaataaatttcccctttaaatctcttgagcgattttcattttttgcaaggccgcactgctggtgtcctggaaaaatggagagttagggctttatcagttggtgccctgaggtatgtggcaaagaagctaaatccttgaagattagcaaaaaaaaatgcagcacatggcaataaggggcttatatgactactagtgttagctcaggtgaaaggagtattgcttatacataaaactggacaaatccactgacaatgtatttttagttagctacaaaggagtcttatattgccggactttccctctttggtgaattgcgaagcttagtaatccactgtaaatactcttctgctcgccccaattccaacattactcccaagtgctgttcttttattttaacacttagaagctcccctcggccccaggacgtggctttgtgccattaaaagatgaagtccctcatagtgtttaagtgactagtcgctgttatctttcagtttgttgttttcagcaaggttcaggagagagatagcttttaatttgtagttaggatctctgtctttattttattttgaaaaacattcagatagagttaacatacaactttagggagaattatttagaaagtctcctttctttatagcatcgttattcatctctttcccttgagctaaatggcctgataccgctttctctgtacttccagactgctctgcaagacacaccacttcactttttgactgaaagtaaagtattgactgctttatgggtagagtttccatttgtcctagctgcccgagagagtcctggttcatgtctacttcatagtctcgttagtagttcccttgttactatgagaggtatgtaggcaatgttgagtatcatgactacagatgaactttgagatgaggtatcagttggtggaatacctgttgccttcaagacccgttcacaccattctgaatctgactatatatttccaattttgcttgcctgttttgtacacatcatttaagtgttttgtttgtttgtttgtttgtttgtttgtttttgagacagggtttttctctgtttccctggctttcctaaaactttctgtgtagaccatgctggccttgaacccacagagatccacttccccagcctcccaagtgctggatcaaaagcgtgcgtgcaccactgtacttggcttcgtgtaacttttagagtaagtcatgagtagcccatgtcttggttcatgtcactgttcagattattcatgataaaaatccagctgcttagctgaataaaggtaaaaccagagtaaatctcaaatccacataaattcactagcctcccatagagaacaaatgccttacagctgacactaggactgatacaagtgctcatgaattaattactgtaagataccttgctaaagaaagtgagcagctccattcgggatatgcatatacgaagacccaaagaatggcccaaggaattgtattttgatttttttgtcaggaagcttagatctgcatgatatatttactaattttgcacccctgagcaaaccttgtattgtttctgagtagttgttatatggggagagtctgccctccacacgtacactatggatttgtgaagatcagttgggtgttggtcaggtgattccttaaaatactgaacaagtgcaagttacggctatcacaaggaaaagaaacaggccaaacactgctgaatacagcaattagaaaagcagagtcttcattcgcggtagagaggagcagctttgcttttaagatataagctctgccaagtgaggtagtgcaggtgttttactccagcacctgggaggcagaggagaacagatctgtgtgagtttgaagccatatggtgtccatgatgagttccggccagccagggactgtgtagtgagacagaatgaataaaaaaggaagaagcagcagggcgatggtggcgcacgcctttaatcccagcactcgggaggcagaggcaggcgggtttctgagttcgaggccagcctggtctacagagtgagttccaggacagccagagctacacagagaaaccctgtcttggggggtggaggtaacagacaataaggagaacagcaaaagcttgttacctagagaaaaagagaagatgattttttaaagataagaatttagcacatttaaaagcttaatggggggctgcagagatggctcagcagttaagagcactgactgctcttccagaggtccctgagttcaatgtcccagcaaccacatgggatctgatgccctcttctggtgagtgtgaagacagtgacagtgtactcacgtacattaaataaatctttttaaaacagtaagtttaatgagaataatttatgaagtcaagaggcttgatgttctgtccattatgctaaggaagagagaagagtctcaagaagtctagagagatggactttatacttagggcctgaaaagtttgtacattcatagaaaataaaggaattcacctacctccagcctcactatttaaacctttttgctaagcaaaaacaaaaagaaatcaagggaggatcttgaaagaaatggtggtttggaatctttgcttcatattcaggattcacatgtctcttattgccagtgtggtagacattgagaaagaaccataaagaagacacttggcttcagtggtactggagtgaagtggacatccaaataaacaaatagcattaaaggcttccataaaattacaagtttagtaaatgtcctttactttcagagtgctttaggttgattcttgaagaggaatgtagtaactgagtgataggagttggctctatgttcagataaacattaattcaacagatgtttattgagtgtgccttccatgccttacggtgttcaagagaatagtctgacagactcatgtgatgataggtttgtaaatgaactgcagatagagagaatacatccatatatacacatatgcaaatacttgtatgacataacgcactgaacagaactttacacatccatttccctacagcccccacatgctctcattactgtctcactcttgggctacagacaatgtaagtcagtatgtgtaggcaggtgtcagtgttaaagggacatagaagcttggagtattccaggacaagttagacagatgtcagtgcttgggatagtcccacatgataaggaattatcccaccaaaaatttcctgagcagtcagtcaccactgaaaaagaatttgggactgcagcaattttgtctagctgttaattcaaaacatttattacaccataagatcgtaactgtcaagagaccatgtaatatcatgctctgactaacagctcaaatatttgtgaagtcctcaactttttcaactgtcattaccttcaccataaatcctttctaaaatgaaaaagtatggcatacacacacaaaaatttcagtttttcatatagtgagcccaaaatggagctacttaatgctataattatacttggtatttatctttcagatataatgaaacaaattttatttacagtgagttttgcattattcaagacctataagtgcatgctgttgtatagggatgatttcatggcagcctttttagttatgggcagtctggcagttatgggactccagagactgctcagtggttaggagcactggcagctcctgcagaggacacagcacacacatggtggttcacaatggtctgtaactgcagtttcaacagatctgatacctccttctgacctccacaggcaccaggcacacatgtggcacacaaacatacatgcaggcaagacatacacataaaataaaaaataaaataaacctttaaaaaaaatcttgtggttatgtaaatacctttcagaagctatgatatcactttgtgtttatgaatatgtttgtgtgcaaaataatatacagtaatataatgcaaaaatgcaataaaaccaaagaaatgaacacaaatcaataagccagaaacaactgccaattaattaatataatataattaatataatataataaaagtttgtagactttgttgtgtgtcgggtagctttgagctattgaaaatcacagaatggctttggaagaaggctcagctgatgtgcttcaaccataaggacctgaggttaggcacccagaaccagtagcatgcacctggagcttgcaggaaggcaagagagaggcactcggaaccctgaatctcattgaacaccattacccctcagagtgacgagattccgttcagtgagagagcagtcttcagaaaaggtgaaggatgacccaggaagacgcccgtttctacctccggcctctcacacccacatctacacacagaacactcactagccatgcctttttagccagcatttcataggactttgttaggtttgtggggtggggaagtagaagagaaggaatactttcaggagaattggttttctaactaatgtacaaatttccacagataaaagtggagcctgtcatccctgccccaagtccagttatccccaggttgactctgcgagttggcgctggccaggacaagatgtaagtatgaacattgggaatcgatgagacctatcttctccctgctgtccaaatatattaggactttaccagacgtatgaacagagtctgtgccaggaactctctgccatcaggttttattggcttcttcctccaggtaaatgcctttatctttgcttaacatataggattccacactttccaccccacctttttttttttttaaaggttaatatatggcagtattacttcagattatctgaggtcctagctatctgcaaaataagagatcatgtcctgagtgtgttaccgacacacttcacacacaagagtacagtgttagaccttctcagagctcgtcatctgtcactgggacagagaatagcgattgaggtggcctgtgctttgtccagtaccaataagacaaagatgtctgctgacttagggaaagggtgtgtgactgacagctggaaaccatggactgactgggttgtatttgctcttaagagaaaataaggaatgtaaatctcaggcttagcatttataggaatcttcacaaatcaccttactgggctgtctttctttttctaatattgtttgtaaattttatgggtatgtgtattttgcctgtgtgcgtgtataccatacatacctgcacaaaggcccatttttctttaaaggaattattttcctttgaggaagtgttaagacctacagtgttctcagagactcccgatacagtaagtcatcttgaaatacttgctctgaacagtacactgtgtgtagcatttcagtggaattcatgagtttattatttattttacttttttcccagtaaatgtgaaagtagaacagtttgctttgaaagcagtcagagatcatgagagggcacggggttcgaaagcagtcagatatcatagagaaggcacagggacattgagtttccactcaggtttagcataaaagtaggaggaagacatcagaatacttactgaataaaggccacagtgcttactgagcatgatggtaactatctatctaggactcaagcacttgagagaatgaagccggaatgtcaagaattcaaagccagcctggtctactatagaaaggccctaaatccaaaaccagaagaagacaaaacttgaagttttgctttttttaactgaaattttcatttactatttttatttcttcttcaacagtttaatacacatatgcaatgcagtgtgatcacatgcaacccagtgccatcacacttgctcagagcccagccccgccccaccccctccctccctcacatcctcatcctttgttctgtttcctttgagtagcccacaggccagggatgactgctttcatgtgcatgggctttgggccatccacaggagcaaaagcagcctacctgctgccttacccacaaagaaaaatgataccccctgccccagcagtcagctgacagtggctcctcagctctgggtgcagcctagtgagcacctcctcttctggtctggaatgctggcaggagtgccctgagcttgtgagtgagtgcagcccctgcctttcatagcccacaccaccatgcagctctgaggtcctctctccacctcttgcacagtgttccataagccttggtggggaagggtgcatgtgatgtcgacggctcccttagggctcggtcagttctcgtcaacacttggatgagttatgagtctatgtgctgagtgctgcccactacagaaagaaccttctctgaccaagagtgagataaagtggacaaagaaatgaaatacaggaagggaggaggacatgcctactcctaaagtatgggaagatttctattgcagatataagggagaaagcaggcagagggaagaaagactccatactgagcatggccaccagactaaaccagaccctgagtaagagaggctactcctgaccaagaggccaggggagctgcttagccaccacagctgagttatatagacatcaggctgagggaagccaagcagaggcctgacccctgagagggtaggggactggatggagagtgctggaaggagccatgaatactgtggaagatgctgggagagctgaccagcctctgctttgataccttactagacaccgccattagccgttcgtttctgacagagcagtacttacccatgggtgtaaacacaaatatttacaaggccttttgacactgtgtccctttagtaaaacaacagtgggagaccccccaccaccaccaccacccagggcctgtgacctccccagacctggacctttgacagggtttacagtgcaggagatcactgttgtcagttcacgtcatcatagagcatgtgtattctatatactgctctcttcaataaaggagtccctccagattatgatggggtaagacagaggccgacattgtctttcaaaaaaagtctatgctggagaggaagagctgagaaggccggggtccaggtgcttcttagtctcccctactttctctgagttccacatcactctgctgtgctcgtacagacctcgaaggcaggtgggctcttactgctaacaaacagaagctcttcaaaactctttgaattctgcttgagcttacttgggaagaccagcctgagccaggttctagctcagcagtagcacttaccagcatgcacaagctctagggaacaccttctccttgaaaatcctctacactgtctcatttctctaagggaagtgttcttgttcatcattcgaaggatactttcacagattcctatttaattcctattttctccatagcgcagcaataccgtcttaactcccacacagaagcttggtttcttccctttagagaattaagatttaaaaaggcattgctggttacattcatctctctgccctgaagcacctgttggtaattctgttggctagctgttctgttttcacctttcagtaaatcattcatattcctaagagataggacgaagcaaggactggatcctatcactctggaacaaaatgtccagcttgagggaaattcagacagcctggattctagatagattacccttggaagtagtattacataacctgtgacttgtgaatgcctagaaaacaaccgccatgttacacggacagctaactattcgaccaaagcaggcatcaagtgtaacacattgcacgtcaaattaaagtccgagggaggcaggggctcaagttaaccagaacttcatataaatacaaattcagtgactatttctcggggatgggaagatctaagttagggcttgataaactgcagctgcggagccatttccagcctactgaatctgtatggcctacttgcttttgtatggcctataagccaagaatggtttttctggttttaaatgactgaaaaacttttaaaaatcttctgtggggctatagggttggttcagcaatgaagagcacctgctgcgccagcagaggaccagaggaccatgttctttgcatgaacatcaggtgactctcaatcacctgtagctccaggtccagagggtctgcacccatgtgcccatacacatcaaatgtttaagtaaaaattaaaaatagtgttatggcacgcaagtcatgggtaacattcaaattctagccgtcttttatggtggcacatgaggaacttccctgcacataccttgttccatggctaagtgatggaacgtgtggagttgcataagtgtgtgtccacttattgtctgtacacctgggggctggcttttaaggtaattaatgagcacatggatattcaaaaacaagagaatctgcactgtgtattcctcatgtctgggggtgggggaggggttattgctgaaggaccaagtcttttgaaattaagatccttaagacaacatttagtttctaagtcttgaagaactttggtcttctgcccttgatccacaaaagtactttgtggttagagagggtcctctgttctctgttagtgctcctcatagcaaggcagcagcagttttccttagtctcccgtccctcaaaaccgtcttgtaacgccagtacccttcctgactgtgttaaaactcagagaagctatgtataatggtgcactctgggagggaacagcaggtggatttctatacatttgatgctagcctggtcttcctagcaaattcaagccagtcagagctataaagtaagaccttgtctccaaacaaacaaacaaacaaacaaacaaaaaaaccaattgtcaagaaagaaacatgacaggctgggtgtggtggcacatgcctttaatcccagcactcaggaggcagaggcaggcaggcagatggccagcctggtctacagagtgagttccaggacagccagagctacacagagaaaccctgtctcgaaaaaaaaaaaaaacaaacaaacaaaaaaacaaaaaaaaaagaaacatgacagaatagtacctataggttttctaagtttaaacatctgaatatttatataattcaaacttcagttatgcctcatagaaaaaggtaattttccatattgtcattgtaaagtattaattaaaatgtaatataaatttgcacaaactttgagggtgactactgatggagaataaccattcttcctcacactttgcatatgtcccccttaaagttgtgctatcacagatagctggagggagtaagttacaccttcaagcccaccctacataagatctctctaagtggcctaggctggccctgagctgggactgtggccatgtgacccagctttgagtgtctgcccctttccttgtgctaggctatactcccccacagagaggctcctgataggaattcagggacctccctgctcagctcctccctccctccaaggcctgtcaggcagctatgtctgctcagaagtgagagctctgagagtttgcctggtttgcaaggggaattgtgtttctcggcttcccccagttttctggttgggtttgagatacgggggggggggggggggccttctttcttcccattgcctttgttcagtaacaagaaaagcaactgatgtaagaaacagcttctttgaaaaataaacgtcacttgagcaaaggacctcataagcagacctgcatcagggggaatgggtgtggtggtggannnnnnnnnnnnnnnnnnnnnnnnnnnnnnnnnnnnnnnnnnnnnnnnnnnnnnnnnnnnnnnnnnnnnnnnnnnnnnnnnnnnnnnnnnnnnnnnnnnnnnnnnnnnnnnnnnnnnnnnnnnnnnnnnnnnnnnnnnnnnnnnnnnnnnnnnnnnnnnnnnnnnnnnnnnnnnnnnnnnnnnnnnnnnnnnnnnnnnnnnnnnnnnnnnnnnnnnnnnnnnnnnnnnnnnnnnnnnnnnnnnnnnnnnnnnnnnnnnnnnnnnnnnnnnnnnnnnnnnnnnnnnnnnnnnnnnnnnnnnnnnnnnnnnnnnnnnnnnnnnnnnnnnnnnnnnnnnnnnnnnnnnnnnnnnnnnnnnnnnnnnnnnnnnnnnnnnnnnnnnnnnnnnnnnnnnnnnnnnnnnnnnnnnnnnnnnnnnnnnnnnnnnnnnnnnnnnnnnnnnnnnnnnnnnnnnnnnnnnnnnnnnnnnnnnnnnnnnnnnnnnnnnnnnnnnnnnnnnnnnnnnnnnnnnnnnnnnnnnnnnnnnnnnnnnnnnnnnnnnnnnnnnnnnnnnnnnnnnnnnnnnnnnnnnnnnnnnnnnnnnnnnnnnnnnnnnnnnnnnnnnnnnnnnnnnnnnnnnnnnnnnnnnnnnnnnnnnnnnnnnnnnnnnnnnnnnnnnnnnnnnnnnnnnnnnnnnnnnnnnnnnnnnnnnnnnnnnnnnnnnnnnnnnnnnnnnnnnnnnnnnnnnnnnnnnnnnnnnnnnnnnnnnnnnnnnnnnnnnnnnnnnnnnnnnnnnnnnnnnnnnnnnnnnnnnnnnnnnnnnnnnnnnnnnnnnnnnnnnnnnnnnnnnnnnnnnnnnnnnnnnnnnnnnnnnnnnnnnnnnnnnnnnnnnnnnnnnnnnnnnnnnnnnnnnnnnnnnnnnnnnnnnnnnnnnnnnnnnnnnnnnnnnnnnnnnnnnnnnnnnnnnnnnnnnnnnnnnnnnnnnnnnnnnnnnnnnnnnnnnnnnnnnnnnnnnnnnnnnnnnnnnnnnnnnnnnccccccccccccccatcccctggcacttgaagtgtctgtgaggctaggcgcttcctctcccactgaggtcaggcaaggcagcccggctagaaggtatccctcagacaggcaacagctttgggacagccctgctcctgttgttcgggatccacgtgaagaccaagctgcacgtctgctgtctttgcgggacctctttaatgctaagcatcgttcctggaggctttcctggctgcccagtgactctggggcctgtgaagtcttgtcttctctgggctcctaggttgtctcagctccctcgtcacaaacagccagttagatggctgtttatttggatcctcaactctttactaatttttttagtttttttagttttttggtttttgttttttcagaaagctctggtcttcatgtattccattactcttcttttcaccaaccttgcgttatgacgaagtcttacatttaactacttcttctggagcattgtactttgctctcagtcaccaaaaatgtagtacatgtatttaagagaaaaactagtctgctgtcagaacaaccaggtttgggtttggggaaatgcttttatgacccagtaaaacaagtggaaagattacaatcaaagcatttccatcttgcttgtaaacaattccagcagttcttatagggatgccacattagaagactgaggaaaatttactgaattccattctaatgcaattagagctaattttgttccttaaatgaataaaaggtcagccagtaaatctagcttatctggagtccagacttcaataaattgttttatttaatttgttgtaaaagatcttatccttaatgggtctaggtcttattagttcacttaggctttaaaatatttatgaccacctttttagatatgatttgaatgatagttggaaagtttctctccacagctttatcaaggcccaacatcactaattgaatgaatataggaaggtacttaagatttgttatcgggaaaaaaaagctgatgtgaacttccagaatgtaaatgtcctttaacctgtgacaggcagagataatttagctgtatcatggtaacctttcggctgctatctgattataattctctaaagatcaacctgctcacagttcagttctttattaaacaagagatgcgtcgggatagaacgtttagacctcctgttacatcatttgcattctctgtttcctgtctatccggtggtagactcagacacttgcataaagattttggatacatggaataacttgtttcgtctccttttccatacctgcctcaggagtttataaaatggatccccgtatcacagcaagggctctgggatgacctttacccctttttcttaaagtgtagcttcagttctgcacacagtactagcaagccttgttggcctgtctgttcagatttgttctgtggggttccagaatttcacatcatatcccctctcagcctgccttccaggctgtaagcaagaccttggagcagcatccttaccgatccttacaggtcagtctcttcctgtgcctcttatcagcctacaactccccacttgctctagggcctctctctctctctcctggtcctcagctctcggctgtattttcctttttctcttgtttttctttcagtctcatcttcgcatgctgagcccatgccttccccaggcttcagtctgtcagggaaatctgaaaacaccccttcagatctccttacgctgtgtgaactctttggcccacttcgtcctgggtttctactcaaggaacttctatagcttcttttttagagaatgctttctattctttgaaagttctatgcacgaataccgtgtacgttgaccatatccatcagctgccacctccctccaactctggatagtgcctcatcccatctgcatcccacccaccttcgggtccttttgactgttggttattagttatgggcgttaatgtttcccatatgtccatgagtgtgtggccatccactgggacataagcaccccatcccatgtcctcaaagcagagtaacttcccttcctctgcagccgccaacaaccaatagctcctcagttttggctgggtccttgagggcctctccctatgcaggctgtaattttgattgctttatttttgttcagacaaccataaatgctatgagttgatatgtacaataaccatatcatgttcagtgtcagcatttcttagcttttctccccatctactagcccttacattctctccatcccctcctcttgaagttccctaaacctttggtgggagattgatatagatggcctgttcttaatttaaatttggtactttaagcagttacaagtttctgcattaaccatcacccactaccaaaagaatcttctctaaccaaacagagaacaatataaatatatgagtataaacttaactatttagaacagagtttggcagcattataatttagccaattaacaatagttttccccaagtccccagacctatgacctccacagtcctatgacctgctcccagctttggagcagatttacaacaacaggcatgaaaatcatccctcctgtacaacagaccagtgtctgctcagagtgtagttagttacacatgtagctgccatgccactattacaccagtgggtgcatcttgccagcaggtcagtgtcctagaatgtggggtctagtgctgagaaagaccactaatggctttcgttccccctgcatagcaccttctgatactatgtaagctagccatcacggagatgtttctggttagtcaaggttgatttctctgtgccctgaaaccgaagtgagtagtgcttcaacaacaaggccacctacggtcctctctaattgaattattttcttgagttggaagatcataggtttccatgtagctttttcccactcttcatttgcaaagcttctgtaacgtgttgctgggactggtgcagaaagcaggctgagtcctaagagccctacttctctttgtttgtcagggccctgttctgttgcccaggagactcgatgtcaccccagtttctccctgcttgttctctgaccatcccttgtactttcttgtatgtactcctttttctttacacaccttcctttcttgctcttctcctcactctattcttacttattcttcatgattcagtcaatcagtgatgattacaaaccttttttgttcatagtatttagcacagttacctctcagcaaattttgtccaaatgaccaatgtcattgtcaagtgtatttttaaaaatcaaaccacagtggtgtcctccacactggctcctcttgtttcttacagctggtgatgaacctggggcctctattctcaagccactgtatatcttagaagaacttgaagaaaggcggagactgagtaatagaattgagatattatgtttattttataatactgtgctggacaaacaagctcccttgcgccaaatattcagaactgagcaaaaaatgaccatctcctttggtctttatatggtacttcagtattttatgtcttttggataaaatcagggttcttgtattaaaaatcatttaaacagtactgctatgtgtggaagtaattaacattgatttttttttttacttctgattgcaaaaataatatggtccttattttctttaaagacttaactgtgggctagtgagactctgagggtaaagtacctgccatcaagctctgtggcctgagttccagcccagaaacccatgtggtaggagaggcctgactgctacaagttaactctgacccttcacaccatgtccacagagtctattaaacaatggaattatcatatattctattctatagctttgctcccacccccgggcataactagatcatgggcatttcatgtatctttattatcattcattcaactgttaggacacttgctggtgttggacttgaggctgatgtggagcatggctctagcatatggtatgccttggctgtgaggtactggctgtacggacgtggccgtgtgagtgaggtactagctacatggacgtggacgtgtgagtgaggtactggctgtacggacgtggccgtgtgaggtactggctacatggacgtggccgtgtgagtgaggtactggctacgtggacgtggatgtgtgagttttgctgacgtatagaagagcactgtgtatgagatgctccaggagtgtctgtttgcacacgtgccgagtggctgtccgtgctccctgtgctctgcaggcacaagtgctctgccaccaccaagccattcaaagccaggaagtagggcgcaatgtttttctacctttttattgttttcaatttatttggtttataataaatacaaggaaattaacatctgccttgtaaacttaggttactgtcacagagccttataaaatgtctaattgccccatctgcttttttttgcctctctaaaagcatgaactatctttctgtatacaagtattcatctgtcacatgtgctttaaatattaccattattgagcttaaaatctaaaagatgaaagagctcttcttgctgggaggtggtggtggattaaagtgcacagcttaaatcccggtacttggaaggcagaggtagatgggtctcttgagtctgaggacagcccggtctatactatggagcaagttccagaacagccagggctacacacagaaactcaaaaaacaaaaagaggccgggcagtggtggcgcaggcatttgggaggcagaggtaggcggacttctgagttcgaggccagcctgagctacagagtttgttccaagacagccagggctacacagagaaaccctgtctcgaaaaaacaaaaagagaaaaaaaaaaaaaaaaaagaaaaagaaaaagaaaaagaaaaagaaaaaacagatagcacttccttaagatttccttcctttttgcatggcaggagaaatttttattatgtgtaggcacactgcatgttcacatgtgggtgtgtgcacattaatgctagtgcctgaaaaggctacagatgtgggattccctggaactggaatcctaggtggttgtgagctacctgggaacctggctctggtccttgggagagcaataaatgttcttagttgctgagccatctctccaactctggtggcctttgtctcagcagaggcacatggtgagcttcacattcttaattaataaatcagtcctttcattagaccttgtgaaatgctgggctttaaaaatctgaccatctatttagtatttattaactgaaaccttttcatgaaagtgtacttttatttggttattttgaagtacaaatcaaacaggaaagggatgagaaatgctgactgaatccctgtcactgtcttcagagggaggagttggtggggctgatccagaattgcactagtgatgatggttgggtttggtctgtctctgcccaccccacccacccccatctgtttcctctcctttcctttctcctttatcatgttcattttcaaattatcctgtcttgtccagtggtaattctctcatgttgtctgatagattcagtacaacctcattagtgctgaatagctttcatgtatttcctgtgtgttactggtcatttccacagacctcaaattaaccattccttcagagaacattgattctatcagtggaggaggaaccgcactatagaggttcccattgctactacaatgtcataacttctaggccttcacaagggaaagatctagaaaatagatgtatttgtaaaggaaagaaaatcaggcaggggggatagcacggtggacatagtgcttagtgtgcaaacaggagggctgagttcagatgcccatcacccttgtgaaaggctgggcatgttggcatacaactgtaatcctaggtctggaaaggggagggaggcggatttctgcagcctgatagccatccaggccagccaaattctaggcccagcttcagtgggaaaccttgtcacaaaacggtcaagaagcagtcgtggaagaagcttgacctcaacacacctgcaaacacgcatacaacacacacacacacacacacacacacacacacaggtgtccacctggatgtgattgttaatgacccttatccaccaacagcatgcatagcatctttctgcattatgaaggtagttggcaggaagttataaagcctactgctcagttccagctttgtttctcagtgtccggcatccagagcacatatctttggcagcagagtcttactggaattccactgggtttctaggaacagtagcattgtattgctttgaaggcctctgaagtgacctggcctacagctaataaggtgttaacctcactcggcatatattcttacatttttctatggatgtgtgatcaatataccagcatcctagtctcctgaaatgtttactatctcatcattatgacatgcttggggatgccatatcattcatttctgcttattgttcattctaagacagttgtaaaagttcattttctgaaccaagtgtggtggcacttgggtgacagaggcaagcggatccttcaaggctaacctaacatacataccaagttttaggccggccagagctatatagtgagaccctgtcttaaaaaacaaattaattttcttgaatatagagaatgatttacctgactccaaagttagagagtgctggcttctgagtgtttgtttcttcccgatccccatggcttattgagagctcatccttccgctttccttagtctgttatcgctctgccgcatcttcttgcaagcccaatgaaatgttcgttattcattacttatctgagtcttggtgcccttttagggtattttacagattttgaacatttgacaatagaagtataatcatttgggcctctcccttggaaacaagattctataatggtgatgtttttctctaattacttcatgcaatttgtttcatttttcaaataggtcatgcctgcattaaaagataaaatgtttgctacttgatgtgtacttgggctatgacaagataaaatacgcattttatgagacgatgtaaatattcaggaggcaaagccatgagctggaggaattaaatccatttatcgttgtcttataattatacgaatgttaaattttgagctgtgaggatcaagaagaataaggaataatgattgatttgaagaatcaacataaaactgattctcataattgtctttgggtatttgatcaacgtgaaatatggaaatgactgtctcactgtttggcattttaagtactgatactctaaaatagaattcctcccaagtttggaatatttgcttagatactgaagctagaaaagtggaaaacttggtgtgtttgttttccattcccatacaacaaataggcctggaatttagctgttttaaacaatgggcctccccgctggcttctgagggtttgagcagttttcactcaggtcttagaagttgcagtcaaggaaacgccatctgaaggcctcgatgaggactgggtctaagttcaccagcccaccagctcctgccaaggcagacaccgcagccgcctttccccacatggggcaaggggagcatggagcactcataggtggtctccgaagggagattgctggaagtgagtgactttcatagtatttaaatctgccagtgagtgcacaccagactgactaccacatttaggctaggtctatctggggctttccataaaagtgaaaatgcaaaaacaggaagactagacatacatattcatgtcacaaaccaacctcgaggtatcccagccagagtactgtaaactctcaggaatagtccgaatttgttgtgagaagaggttcatttaacatgtgagaatgtgtttcttgtggcagatggtatgtctgaaatctaaaattaaatatgtataagaaagttaggagaattgctatttaagcaacatgctttttcctcaaagtgattgttctgcattgactaatttctgtgttcagaaggtcacatggccgctctccctaaacatgactactgtgcttttctctgtcatgtcatcatctaaaaatggccactcactgttaggtaaataagtaagccattgtgagggaacttttcaactgagagcacttgagtagccagttatttggactctgataatttagattactggtttcatagtgtttgcacacaatagcggaataatgaggatcattaaacctcctgtgcagaacatatccaaattgtgtttgcttctaaccttggaggctctggggggctgggaggctcggcctgcctctttattgacttgtcaagctgtgagtttgcattacagctcatgacccattctgtttgtggtggggaaacaggtaaagaaatccctctgacagtccctccttccacacatttgtatgaataacgccagtgtttctagcagttagagcactgtgactaaatcctccaagagctgtaactttagcagcagagccactgcggggcacacttgtggactgcattgctttctctgggagccgctggcactcaacaggaagctctgaaggggaacttactgtgcatgtcaacaggaaggcaagagcaagcaggaccaaaatcttctccactgtgattaaatcgtgtgctgatgacaggttagcagatctggtcggagagcctggactatgttgtactgctatgtgatttttcatattgctaaaactagataataaaagaatttttcttaagaaagggagggggaagggagggagacaaagaaaagaaaagaaaagaaaagaaaagaaaagaaaagaaaagaaaagaaaagaaaggaggaaagaaaaggaaggaaggaaagagagagagagagagaaaggaaggaaaggaaaggaaaggaaaggaaaggaaaggaaaggaaaggaaaggaaaggaaaggaaaggaaaggaaaggaaaggaaaggaaaggaaaggaaaggaaaggaaagaaaagaaagaattgttttgaaaactgtatattcaactagcctaagtctcttagaagctaaactcaaaataactcaaactctaggaaactctgaacttcaagagctggggaagtagttataatttatagtttgtcttataaaatcatgtgtctactttaataacttgtccttacacacacacacacacacacacacacacacacacacacacacacgatacatgcataagttccctcacactaaaccccacctctagacaatccttccacttgtcatatcaacacactgaagacccagcacacgagcatatgtatcttctggaacaaaccacatgcaaaccatagcaaaagctaaaggacgcatttattactttagccacacaaacaaacagcatagaccgggaagcctctcttcgctgcttccttggactttaggcttttgctctccatcagcgatggcagtcacctgtgctgtgctgccctttgacttaacctggggctccatgccatttatgtatcactaaacgtggccagcatttccctagaaggtactgggcaagccatcattgtgttaagttcccagagatacctagatgtgtatatttttacttttttgttaattttactctaagatttatatgttaattatggataagcgaaggaaaagtagcctgtaatcccagcttactgaggcagtttctgaatagtttacacacacttgagtatatgcttttgaactttttttgtaactacacacaaatattcatgcttgtatttttccttagaaaacttggatttatactactcacaactatttttttctttttgataaaaataagtgtgtgactacttatataatgtggtattttgacacaggtcttagtctatagccctgaatgtcctggaacacactgtgtaaaccaggctagcctcaaactcacatgtgcctgtccctgcctcccagccactaggattgaaggcatgagctagctacctggttagccaaagggttatccatcatggttttataaaccgttcagaagcaccatgccggctgcccgtccctcctcagacctacagcactatgtgtcctggcgttttagtcttcacagtaaggccattctgtcaccgtattcacctttccaccaccacacccattccccctgatgcaggtctgcttctgaggtcctttgctcaagtgacgtttatttttcaaagaagctgtttcttacatcagttgcttttcttgttactgaacaaaggcaatgggaagaaagaagggccattgtgcatcctagttggaggatacagcccatcatagtaaggaagccatggccccagaagctcacattcatccacagtgaagaagcagaaaggatgagtgttgctcagcttgctctctcagacctcagcccagcccacccagggctgctcctctaacctcatgtagacctttgtggtttagctctctggttttggtgttaggttgagcttgaactaagcgcctcagctgtactcagcaaatataccactgacttgtgtcctaagcccctacttttaaaatgctttttattatttatctaatttgtatatgtttgagaatttgtctgcatatatgtctgtgtaccacgtgcatgcctaataaccagagaggccagaagatgacattacgtcccctgagattagaactacacactgttgtgagcggccatgtgggtgctgggaattgaaccctggtcctctgaaagaacagccagtgcacttaaccattgagccattactgaataaatcttttttaatttatccacttagcctataaaatgataaatattgcttatcttaattagcttataaaatgataaatattaaggttcttaataatttatttaaaaatgtaaaggcccaaatagtttctttctgtacaagcctgcaggtagtaaactcttacattttatttgactaaagtgtatttatttggcattctttgtgcaggatttcaaacctggaatttatttttctttggcatgtttgtcttctgctttgctgagctcctgagtcggctgcactgtttctcctgtgaggtggctgttctttttcctctagctgctgctcaggcttctctctgttgtacagttttgttagcgcatgcttgggctgtgcttttcttcttattgacctggaatgcatgtgtttcttacatgcatagactggtatcttctgtcagttccatacaattcctccttggcagatccgccatcttaggttgccactgcaacccagacttcactcagcttcactcagtgaggcttctcagggccttcactccgggcctatctgccacgtactgtctggcttgatagctgtctgaaatccaccacccctcacttttgcagcatgcatgtcttcatatccagcagaaagggagggacctgtctacaccccccacctcagccaccacccagcaaagtttgtttgtaattgctttctaggggcagtttaaagagcctgaggttggaagcttgggtgggtagagtctggccctgaggggacacttccctttgttccactgcagagcaggctttttcttaatgccccaatctctctcttaaacaattacagcctcctgcagccagcctcggccagtgtgcttttctcctaaacttgctgatttgcatttggcctacttgtgctttttgctggagactgcagagtgttatcaataacagccacaccacatattttgttgctttaaaatttccttctctagcctttaatcccagctctcaggaggcagaggcaggtaggtctctgagttcaaagccaacctgatcaacatagtgagttccaggacaactagggttgtacagggttgtaccctgcctctaaaaaacaaaacatatacaaataggaggaggagaaacaagaaggaagaggaggaggaaggaaggaagaagaaataataatcccgggggctggagaggtggctcagtggttaaaagcactgactgctcttcagaagatcctgagttcaattcccagcaaccacatggtggctcacaaccatccgtaacaagatctggtgccctcttctggtgtgtctgaagacagctacagtgtacttacatgtaataaataaataaatcttaacaacaacaacaaaaaagaaataataatccccaccaaagaaattaacccgttaattttaaatgtagcctcaggcaagttctcaagatgtggacagaaagcaaccaaatccttgaccaaaacatcacgtgactgactggcttctcgtggggctgctagtattgattccttcttagcccctcacgctggccttcgtagtctgtgccgtctcagcgttgctggtttccaggcttctgtcagagcagcttactcagtgatgcttagagcatctgaccactgttctggaatagacttctcaagtcttccacggtcctcaaaagagtagcagagtgacggaagtgtgagacaagcgcccactgcctctgccagcctctgtgatagttacttagtgtttgctgtgatcaagcaggactgtaaccacagcattgtatagaagagatttggggggcttacagttccagagggggtgctcagttatggtggagaggcatggtcacaggtagcaggtgcgatggctggagcaggaagccgagtgatcacatctttcgctacaagcatgaagtagacagaggatgagactgtaatgtcaaggtcgagccctggtaatggctgtaccacataattctccccaaactgtcaccaactagggaccaagtgtttaaataccagattggggggggggggacgcagcatgctcatccgaattaaatataaaaacacctgcaggttttagggcttgatgacttccagggagaaaggggttcctctgaagcaaagaaaactccagtggctcaagagaagccactcggaagtgacacagcacttttccaatttcatcccagaagtcgaggtgacacatctgaagtcatcagggaggagtgagtgacccagctacagaaaaacacaatccatatattagatatgtgtaaaaaaatgcatgtgagattgttagaacatctcacatattttatcattgagggacagtttgagaaaatgaaaagttagctgacatttcaagagtgatatgggataggccttgaattctgagttctttaactgtttctggacattttcaagtggattttgcaagactggggatatgactcagctcttagagtagctgccacttgtgcatgagacactgcaagatagatagatagatagatagatagatagatagatagatagatagatagatagatagatagatagatagatagatagatagataaaggctggcggtatggctcagcaacgaagcccgacaacttgagtttgcgctctagaactcatgtggtggggggaagccgtctcccagcacaatgtcctctgactgtctcacagcctattctgcttccagaaaaggattttgaaggaattgttaaatctatgatgtgttttgaccttggctcttttctccttggcagtgttatcagcaaggtggtaccagccccggaggctaagcccgctccttctctgaacagacccaaaaccccacctccagccccagtccctattcctgtgcgagtgagccctactcccctgcagccaccactcctcacccaggctgcagtgtgcccagccctgatgccatccccagctcccgccctctctggaatagggagtgccaaagcccccgtgaggagcgtcgtgactgagacggtcagcacttatgtggtacgtacatttccacagcattttacggagggcagcttctgtagtgttgactctcacaggtgatgcttggcagatggggaagcatctccattgtcttttcaagctgttgactgcagactcttacgttacaaagttcttgttcggccacgtaaatgatgtcaaattgcacttgtttatgttggtttgagccttttctatacctaaatataagaacactagtatataactgtggtgtttaaattccagtggagtctcactagagtgagtaaattattaacattagcataagttatatattagacatagatcttatgagccagctattatttctgaattgtagcactaattatcatattttatttgctgagatccaggatatataagaacttagatagaacgaacctttagaccataggaatttctgagtatccaagtgcattttttattcttagacctagctcagtggtagagagcttgcctagcatgggccggaccctgggtttaagccctagtgctaagagtacgtaatgaaacacatctcatcccactgagtggctctgtgtcgtcctgagagtgcccttaggtatctccctatactaaatagtgtcagatcttattccaaccccaaattcagtccaataatgacctatttataaagatatgttctcaaggcacagtaaagagacacacagtagtttgtaaatggagatattgacacttttgaatgacaagctctgtagactgttgagttaacctagcctttgaagagttgaatgactgggaagttgcagggcctggtgctatttgttatgagatatctatatagcgtgttacatgggagtttggaaaagaataaatcattatatatgtgagacagtataaggaaacaaatatttttaaaaatcctgaatgcattcagagtacagagacaggaaaaatgaacttaaaattagtaaattagcaattcaagacagaaaacgtgatacaaaaacctgtgaggattcaattggtccattcctcaatcaaccgaggagtgcaatcgaggcatcgcccccaggtgagctgaccaggaaagagtctatactaaatgtcctcagcctccatttgtttgtctgtaattaagggatttgtattagactcagtaatctctgtactcttgtctggctctaaagattgtggctttccagtggacactggaactgacttcacagatgtgacagcaactgggacagcgctcaaatgtcttgtagtctaactaggcactttacagatagaggacacagagggcaattactgcctgctagtgtgcttttgacagtgagattctcatagctcctgtttccccatttctaaactatcgaagatgtgttttaaaagaactcagtaccctggaaaatattgggtcctactgtggtgctatagcaatttttttaatgtatctcagagtcacaagtctgctaatgtcaagtaaggtcagccagcagcaggaccagccatgcatggtggcttcacccactggacacccccacttgggggacgctgctggttctttccccatggtgcagtgtcccccaagttagagctggcagtcagagacagctttctccacattcctctagaacagtttcaggtcaaggtggattgctttatagagatttttgaaatagtaacttttgagcaagtccatgcatacagcagaacatgcccagtcttggtaagccctcacaaagaaaccctggtcgttcacatatcgagtcagtgcagtgctaaaggcataggacgaggacaccttgcaaaatctgtagtgaagtcatatgctgtcttactgtgaggacatttaaaaggaagcgtgactcggcgctcctttccagtgtccatgcagttctgataatgtgacatttgagaaagctgtccagttaggagcgctccctgttgagaacgaagtcagaacttccagaacacacagcatttggagcataataatcatttagttcgttggccccatgagcctcttctttcctccgccctttagttgattgtgcttttctaaaatgtcataaagggaatggaaagttactcagtaacagctcttttccatccttgatcttatcacctagctcaggagcagggcctggctaatgagtaatgacggcgcgcatgcacacttgactgtctgtgctagaccgtggctgaggggatacagaaagctgagggctttctaactctcacttgcttctgcccgacaccccataatcattgggggtttgtgagcttataggattcttaggtgaagccgactcaggttgtgttccacggttcccagagatgactctgtgatgctttgcttttagtgatttataaagcagtttagaatgtgcattagaaatgtgtccttctatccaggcatggcagcacacaccagaaatcccagttctcaggaagtagaggcaaagattgcagttcaaaaccagcctggactatatagtgactgccaagccaagcctgcctgagctcatgagatctgcctcaacaacaacaataacaacaaatcggagcggggtgtgtgagggagagtgtaagagtaggggaaactgagagggagagagctaggagagagtgagaggagggagtgtgtgagggaagaggaggaggaggacgctgttcctgaatgaccaggtgttctcctctttatggatccagagcagaggcgactgatggtcgcgtacaacagtgctaatgcatgcacctagcttgttggtttactgtggccagtataaagcagcattcttacctgcttctttccccccacaccatctgtttctgctctgcactttaccaccagatccgtgatgagtggggcaatcagatctggatctgtccagggtgcaacaagcctgatgacgggagcccgatgattggctgtgacgactgtgacgattggtaccactggtgagtgcccccacccccgagtgtcagacagcaacgcaggtcgagctggagcaggtgtcctccccagctagcatcttagacggactcagctcctctcttgacgacagtctaatggagcctgcagagtaaagtgactgaagagttagctgtgctgttgttccagagcctggcccgtggatgctcggcttcagatatatatcctctcttataaaaatacgtaagggtgtagggtccccctcctccctgtcactggcattgggagggagagctacaacacgtgtctgtgtgggcttgagaagagactcagacagcaggtttgcttctgaagcttgcaaagatgctcagccaaaatgtgttcagctgcgtttcattcctaagctgcctctttggatctgatgtgtgctgtctacgatagacccgagccgggtgagctgggctgctgctaacttcagcactctaatgctgagaatcacaagtttgagaccagccttggctacatagtgagtttgaggtcaacctgggctatcttagactctttcccaccctcagcctctactcccaaattaaaacgtaaaagcaaagccatttgcattatactattcctgatggaaagtacaaataatctatatgatctcgcgatacagaaggcattatataatatagcctaaataaccaacattagtgcaaagaacctttgggtgaatttttggtacatacatcattttttgtgcttatttctattgtgggagtggagcatgctgtattggtttgcacatcattttagcccatgcatgtgaaggtcagagaaccactgaaaggagccagttctccacttctaagcccatcatgtggctcagaagactatgttgtcaggcatcgtggccagtgtctttatctgttgagccgtatcaccatgtcttaaaaaaatcattttaaagcatcaaacaaagaagggattggtttaactcagttggtagagtggttccttagcgtgcaggaggagccttagggtccatccccacagctgcagaagctgactgcgagggttcacacatcccagctcaggaggtagaggcaggaagaccaggaggtcacggtcagccttgactgtaccaggaagaaatgacccctttgaaaacatggcacaagagctgaagaacactgcctgctcctcccgagcagggaagtcccgcaccccaggggagttcacaatgggctgcagctccattgacaggagtcagacatgctcttctgttctcaggcagcaccaggtacacaaaatgatgcgcaggcaaaataacacagaacacacataacaaaacaaaaactttaaacttactttttttaggaagcatacagcttgcagaccctgcctcagaaaaagaaaattataaacataagaaacttactggactggagagattgctcagaggttaggaatactgtctgctcttctagaggtcaattcccagccaccacatggtggctcaaaaccatctgtaatgggatccgatgccctcttctggtgtgtctgaagacagagacagtgtgctcatagaaataaaataaataaatctttttaaaaaaaaaaaagaaagaaagaaacgtgctaatgtgcgcttgttttggtgtgtaggccctgtgtgggaatcatggctgctcctccagaagagatgcagtggttctgcccgaagtgtgccaacaagataaagaaagacaagaagcacaagaagaggaagcaccgtgcgcactgacatcagcgtgggcaggactgctgccctgcgccgggtcggggctgggctggttctgccatcctgtctcccccgggccctgtggacttgcagcgcatcccagaggagcaaggacaagaacatggcacccctctggatgctccctctgaaacacatgggcctgagctcccgcagcatgttgctgaagaaaactccagtggagggctggcccgagggctggcacctccatctgcctattaccagtgacaagtattaataaagacgccacacatctgccctctcgatttcctttcttctctccagaacctttcgtcatggtattagataagaaggtaatgtccaaatgccttgactgatggaagggcgcatcggtagctacagttggcaagcccactccctccacggggaggtaatcagaaggaaagaacgctccagtcacagcactgggaatatttttgtgatgagagtatatgaagctccccacctcacccgacttttattactaacgtgtaaaatgttcaggcttttgtgagataccttatattttttaagaaaagggtttctatcatgtcctgtccacccctgtgcagattgtcttcattggcctattttataccttggttgcattcccatcccactgtgtgaactgctggagtccccctgctgcgtgtgcatcccatcgacttgtataaaactcttgatactaaggagaatcccctcactgtaaataataaatatttatgaagtagttatttttaaaattttttatcgtgtttaattctggctttctctggaatccactgcgatttcagccatgtctgtaattgctgctgtgcataggcaaagaagagagacgaggacccagagccatgaccctgcccaagcgcaccgcccacgcaatgggcggggaggaccccgcaaccggaaggaaacaggcaattgacatctcaagttgatggtttgaaactgttttgtttgttatatattttctgtaaatttctctcacttttactaaaaaggacatgtagtttccacaaaagtaaaaaaagagaaaatactgtagcatttgtgtttatattgttttatttcacagatttgttcatggatattgtgctttaaggttgaaatgaagtatattatggatttttttaagaaaactcatcaaatttcagggtatcacaaaactttattatattactatactgcccactatttatttatagatatctgaaacgtaaaccaaatgttttatttttaatgtaaaaaaaaaacatcaaatttaactttattagcatattttagtgactttggaataactatggacttttacttgattttgaaataatcccaatttgggcatgcgtgaaggctgtcttgaatgttagaatgcaggatttgaacctaatacaaatatatgaatagaaatgtgattttttttttactcccaactcaattgatattagcattataattacccctattttaaaacatataatgtggtttcagaaatgcggttctcggccttgatgttaaattgcagaaaagtgggaatggagtcaacctgtgaagagtgtggaagtcactaccccccttgttctagaagccagattgt

SEQ ID NO: 388 - DNA, 4601 bp, Mus Musculus
agtccaaaatggcggctctcaggctggcgcgctccgtgctgctgaggctttgaggtggtcgctccgggtcggaggggggacgatttccccgccgcggggcccccagagaatgaatcgggggctctgctgaggcgaggcggcagggctggagagcagtggcagcgaagggctgcggtggcgtccacgcagcgggatgtgcgagagttactctaggtcgttgttgagggtctcggtggcgcagatctgccaggcgctgggctgggactcggtgcagctcagcgcctgccacctcctcaccgacgtcctgcagcgctatctgcagcagctgggccggggctgccatcggtactctgaactctatggccgaacagaccccattttggatgatgttggtgaagccttccaacttatgggagttaatctgcatgaactagaagactatattcataatattgaacctgtcactttcccacatcaaattccttcatttcctgttagcaagaacaatgtccttcagtttcctcagcccggaagtaaagatgcagaggaaagaaaagactacattccggattaccttccccccatcgtgtcttctcaagaagaggaggaagaggaacaggtgcccactgatgggggcacctcagcagaagccatgcaggtgcccttggaagaagatgatgagatggaggaggaggaagtcatcaatgatgagaacttcttgggtaagaggccactggacagtcctgaagtggaagaaatgccctccatgaagcgcccacgactcctgagcactaaaggggactccctagatgttgtgttgttagaagcacgagaacccctcagctctataaacccacagaagaccccaccagtgctctctcctgtgcgtgtccaggacagggctgatctggcccctccatcaccacagcctcccatgctggctccatttgcaaagtcacaactaccaattgcaaagccgttagaaacaaagtcgtttacaccaaaaacaaagactaaagctagctctccaggtcagaaaactaagtcacccaaggctgccctatcaccagcaaggcttggaagtcctattcggtcaccaaaaaccatcccaaaagaaaagaagtcacctggacgctccaagagccccaagagtcctaagagccccaagattgtagctcatgttccccaaacccctgtcagacctgaaacaccaaataggaccccttcagccatggtggttgaaaaaactgttaaagagaccatcccagtgatgaaaccaacacagactcccccagaagttgtgaaactgaacattgaaatgcagccgaaaaagcctgtggtgacagacaaaaccatcgatgactccatcgatgctgtgatcgcacgtgcctgtgcagagcgggagccagaccctttcgagttttcttccggatcggaatcggaaggagacacttttacaagtcctaagaggatttcaggctcagagtgcgccactccaaaagcctccacttcctccaataacttcaccaagtccctggccactcctctgcctctctccagcggaacctcaagttcagataactcgtggacaatggatgcctctattgatgaggtggtacggaaggcaaagctgggagccccttccaacatgcctcccaccttcccatatatctcttctccctcaatttctcctcccactcctgagcctctacacaaggggtatgaggagaaagccaagctgccttcgtctgtggatgtaaagaaaaagttgaaaaaagaactgaagactaagttgaaaaagaaagaaaagcagcgagacagagagagggagagagagagaaacaaagaaagaagcaaagagaaagataaaatgagagagagggagaaggagaaggaggctggaaaggaacttaagtacccgtggagggagctgatgaaagacgaagattctgatccctataagtttaaaatcaaagaatttgaagacattgatgctgcgaaagtgcgattgaaagatgggatcgtgaggagagagcgagagaaacataaggacaagaagaaagatcgagaaagaagcaagcgggagaaagataagcgagaaagggaaaggcttaaagaaaaaaacagagaagacaagataaaggcccctccaacacagctggtgttgcccccaaaagaaatggcactgcctttgttcagcccttcagcagtgagggtcccggccatgctgccggccttctcaccaatgctcccagaaaaactgtttgaggaaaaagagaagcccaaggagaaagaaaggaaaaaggacaaaaaggagaagaagaagaagaaagagaaggagaaagaaaaggagaagaaagagagggagagggagaaggagagaagggagagagagaagagagagaaggagaaggagaagcacaaacatgagaagataaaagtggagcctgtcatccctgccccaagtccagttatccccaggttgactctgcgagttggcgctggccaggacaagattgttatcagcaaggtggtaccagccccggaggctaagcccgctccttctctgaacagacccaaaaccccacctccagccccagtccctattcctgtgcgagtgagccctactcccctgcagccaccactcctcacccaggctgcagtgtgcccagccctgatgccatccccagctcccgccctctctggaatagggagtgccaaagcccccgtgaggagcgtcgtgactgagacggtcagcacttatgtgatccgtgatgagtggggcaatcagatctggatctgtccagggtgcaacaagcctgatgacgggagcccgatgattggctgtgacgactgtgacgattggtaccactggccctgtgtgggaatcatggctgctcctccagaagagatgcagtggttctgcccgaagtgtgccaacaagataaagaaagacaagaagcacaagaagaggaagcaccgtgcgcactgacatcagcgtgggcaggactgctgccctgcgccgggtcggggctgggctggttctgccatcctgtctcccccgggccctgtggacttgcagcgcatcccagaggagcaaggacaagaacatggcacccctctggatgctccctctgaaacacatgggcctgagctcccgcagcatgttgctgaagaaaactccagtggagggctggcccgagggctggcacctccatctgcctattaccagtgacaagtattaataaagacgccacacatctgccctctcgatttcctttcttctctccagaacctttcgtcatggtattagataagaaggtaatgtccaaatgccttgactgatggaagggcgcatcggtagctacagttggcaagcccactccctccacggggaggtaatcagaaggaaagaacgctccagtcacagcactgggaatatttttgtgatgagagtatatgaagctccccacctcacccgacttttattactaacgtgtaaaatgttcaggcttttgtgagataccttatattttttaagaaaagggtttctatcatgtcctgtccacccctgtgcagattgtcttcattggcctattttataccttggttgcattcccatcccactgtgtgaactgctggagtccccctgctgcgtgtgcatcccatcgacttgtataaaactcttgatactaaggagaatcccctcactgtaaataataaatatttatgaagtagttatttttaaaattttttatcgtgtttaattctggctttctctggaatccactgcgatttcagccatgtctgtaattgctgctgtgcataggcaaagaagagagacgaggacccagagccatgaccctgcccaagcgcaccgcccacgcaatgggcggggaggaccccgcaaccggaaggaaacaggcaattgacatctcaagttgatggtttgaaactgttttgtttgttatatattttctgtaaatttctctcacttttactaaaaaggacatgtagtttccacaaaagtaaaaaaagagaaaatactgtagcatttgtgtttatattgttttatttcacagatttgttcatggatattgtgctttaaggttgaaatgaagtatattatggatttttttaagaaaactcatcaaatttcagggtatcacaaaactttattatattactatactgcccactatttatttatagatatctgaaacgtaaaccaaatgttttatttttaatgtaaaaaaaaaacatcaaatttaactttattagcatattttagtgactttggaataactatggacttttacttgattttgaaataatcccaatttgggcatgcgtgaaggctgtcttgaatgttagaatgcaggatttgaacctaatacaaatatatgaatagaaatgtgattttttttttactcccaactcaattgatattagcattataattacccctattttaaaacatataatgtggtttcagaaatgcggttctcggccttgatgttaaattgcagaaaagtgggaatggagtcaacctgtgaagagtgtggaagtcactaccccccttgttctagaagccagattgt

SEQ ID NO: 389 - protein, 932 aa, Mus Musculus
MCESYSRSLLRVSVAQICQALGWDSVQLSACHLLTDVLQRYLQQLGRGCHRYSELYGRTDPILDDVGEAFQLMGVNLHELEDYIHNIEPVTFPHQIPSFPVSKNNVLQFPQPGSKDAEERKDYIPDYLPPIVSSQEEEEEEQVPTDGGTSAEAMQVPLEEDDEMEEEEVINDENFLGKRPLDSPEVEEMPSMKRPRLLSTKGDSLDVVLLEAREPLSSINPQKTPPVLSPVRVQDRADLAPPSPQPPMLAPFAKSQLPIAKPLETKSFTPKTKTKASSPGQKTKSPKAALSPARLGSPIRSPKTIPKEKKSPGRSKSPKSPKSPKIVAHVPQTPVRPETPNRTPSAMVVEKTVKETIPVMKPTQTPPEVVKLNIEMQPKKPVVTDKTIDDSIDAVIARACAEREPDPFEFSSGSESEGDTFTSPKRISGSECATPKASTSSNNFTKSLATPLPLSSGTSSSDNSWTMDASIDEVVRKAKLGAPSNMPPTFPYISSPSISPPTPEPLHKGYEEKAKLPSSVDVKKKLKKELKTKLKKKEKQRDRERERERNKERSKEKDKMREREKEKEAGKELKYPWRELMKDEDSDPYKFKIKEFEDIDAAKVRLKDGIVRREREKHKDKKKDRERSKREKDKRERERLKEKNREDKIKAPPTQLVLPPKEMALPLFSPSAVRVPAMLPAFSPMLPEKLFEEKEKPKEKERKKDKKEKKKKKEKEKEKEKKEREREKERREREKREKEKEKHKHEKIKVEPVIPAPSPVIPRLTLRVGAGQDKIVISKVVPAPEAKPAPSLNRPKTPPPAPVPIPVRVSPTPLQPPLLTQAAVCPALMPSPAPALSGIGSAKAPVRSVVTETVSTYVIRDEWGNQIWICPGCNKPDDGSPMIGCDDCDDWYHWPCVGIMAAPPEEMQWFCPKCANKIKKDKKHKKRKHRAH

SEQ ID NO: 390 - DNA, 50244 bp, Homo Sapiens
atggtaaaactacaaaggaaacagattgaagatcaagatagtagttccctgggggctggggtaggagtggagaaagcaggggtggatgggaaaggagccacaggattgggagggccctgctcatgctcttctgaagcaggcgatggcctcgcaggtgttcactgattattatgcttcataacttccacgcgcgttacttattcctgctggtaggtatcagatcatttctaattttaaaaattgtttaagtatcttcacactttttccttttcttattaaaagttttaggcttttggccgggcacggtggctcacgcctgtaatcccagcactttgggaggctgaggtgggcggatcacaaggtcaggacatcgagaccatcctggctaacatggtaaaaccccgtctctactaaaaatacacacacacaaaattagccgggcgtggtgacgggcgcctgtagtctcagctacttgggaggctgaggcaggagaatgccgtgaacccaggaggcggagcttgcagtgagctgagaccgtgccattgcaccctagcctgggtgacagaacgagattctgtctcacacacacacacacacacacacaaaaaaagtttcaggcttttttttctgacgaagtcctttgttcattttaattgattttgatgctgcaattgaagctttcttataaaatcttaagtaaataagaaagtgtaaattaaacaaataaaaataagaaacctttgtttgttctaaaaaaaatctattttaaaacgtttgtatttttaagtattcctaaaaccaacacttgaagtgatttagttttataattcatttctattcctttaaataacataaaggaatgaatacaagtttttgcagtattaagtaacataaaggaatgaatataaatttttgcagtaggaacttgaaaaacaaaagtgaaaataaacaataaaaacaaaataacaaaaacagaataaacctagcttgtggagtcttactttaaatcaagcttaatgttaagttttttttactgaaacacaaacaaccatcattaatttttgataccgttatgagttatttgagctctaaattcaaagtaaaccaatatattttctaaagtagttgtatgaaaccatcccagttttcctagccaagcctcacattcttccttcattcaaaggcctatcttgtagccattttgccagttctaatctgatagaattgcacattagtaaaataatatatcttactatacagaaaaatccaaattttcaagttattgtaactataaagcagaccttacatccataagacttgaaactgtcttactagtagtcctgggtatcccctgtagtccctttctagggaatgcttggagtagagcagtttccctctggtctcccagtatccataaggccttccctggagaacacacactgttagagctgagctatatccagattagtccccagagttagaagagcaggatgcaccataacatactctaaagacccgttatcctgcctaagccaaacctttatcattctgttttggcatcattgggatttatgaacctctgtggagtaggaggaggttctttgaaatttagaaatgtaatattaataagtgaatgttcattcactttcagaataccctaaagctgtcttctttctgattttctcatgtttatctgttggcagttgagcagatctgaagtccgccttgtcattctgatagcaaaagcgagggagggagggaaaagtttagatgagctgaatgtggtaggtctaggacaggggtcagcaaacgtttttttgtaaagagctggatagtaaatattctaggctttctttgttgcatgtataactggaacacagtagaccccaaagggagtacgtggttatttctagttgctaagagaaggcattacagaataggtaatacttgagagccttagaagtcgccaacatgttaggaaggaaaagacatttcaggcacggggaatcgcatgtgcagaggtacaggagtgtgaccacatatttggggattgcagataagttagcatggctggaatgggtagagcacgcaggggctcactgtgaatgatgaggttacttccctagcttagagggagcaccttgtcagtcatactggagaaattggatttttatattttattttttcctccaatttcccagatggagaggatttttgtattttagaatagtgattttcaaacatgttttagcctcacaacaaaagcttttgtggaagctctgcatgtaaaatagataaccccaggcataactcttccgtgtaataaagaacagccgtttctactgtgcagtagcctcagaaggggttctacaaaccctcaatttccaagggatgccttttacaaactgcttctgaaggaagcaatgaaaggtttttaagatgaggaaccacaagctcagatttgcgtgttcggaagatcaccgtaagacgacgtgagagatggttctgagaaagctgcactggaggccgagactaggtagaaggtccttgcagccatacagagaagaggtgctgaatattgatattaacaagacagaagcagggggaaagcacatgaaagcaaacagagttgaaaacttgtgctgtcaattcagatctggcggagaagatgggagagaatctagaatgaccccaggttcctgacttgggacctggtgggtgatgccatcattatcgcgaatcggtagcataattgatgaggttgtgatgttctttatgatttactaagtacttccccatgcatcatctcacgcgttctccatctgtgcatccttcatgcttttgcagcatggcttctgctgttggcctcatcctcgttgacctcttaagcatttggctttgttcacctgccttctgcataaaactcttgctcccttgatctctttgacatctgaccctccatgtatttctttagttcttcttccttttctttttatatataggtattcctcaaaatacctgaacctgtttcctcttgtttcttccttgttcatatcatccatcatggtgactttagttatctcaacaacactctttctctcatgcactctgtcctgttttctgatcatctgtattatatttcagctgccgagtaggcattgcagactaaatgttcatcaaactctgtgtctagggattgagctaataatcattgtccttttctatttccttatttcctgtttctgttcatcactacatttatcactcaccaaggctcaaagctttctttcccttttttttttctttaaaaatagggtctcgctctgtcgcccaggctggagtgcagtggcgcaatcatggctcattgcagcctcaaccttctgggctcaggtgacccttgcacctcagtctcccaggtagctgggactacaggcacgcaccacaacacccagctaatttttgtattttttagtaaagatggggtctcactatgttgcccaggctggtttcaaactcctgggctcaggtaatcctactccctcggcctcccaagatgttggcattacaggcatgagccaccatgcctgaccaggctcaaagctttgaaattgtgtttgagtccttgctcaagtcttataccctaatcatttatcagattctatccattctatcctcagaatatccttcacctctgctgcttcctgatcatttccactgttctagctctgacccttactgcctctcacatcacttcagtaatccatgttattgctctccttcagtacccatcacctcccaccctcatccatcctgcgtgttcctgccagtgtgacttttcccaacacataccccacacgtttttctctgttgtctaaaatccttctaggtccaaactaccagtagaataaagattatgtttctttttctggaattcaaaagtcctaggatctggatgcaattttactaaacctgcttcctactgctccccaccttgcactctactttccagacaaataattttctgtttctcttacactccccgtgtttcaccttcatctatttgtcatctgaccctttgtcctggacttcaccacttccagtctccaactatcccaaacgctgcataattaatcaagcctcctccgcatgattgacctcgctgagatctgtctctcctttgacctgctgtagcactttatctgtctgtggcactgatcactttctgtgggctagacatatctgttattgctgcactaaactgtgagctcttttagttgtgatttatttctgatttatttcagtggctcttttagactttatcattgtacattatatgcttagttaaaatgtgttgggagaaataatctgatcttagaaaaactcagccaagtaggcagggcaagtaacatcggctcctttttgaaagattaggaaacaggctcagagaggttgagagagtccctaaggctggttgctctctagtgccgtaactctagccgaaaaaccatttgtcaagtgcctaaaccaagtgtatttcattgcaccatactccctctccaagtggctcacatcaagcaagcaaaatagaagacataagtagtatatgaatttgtcataaaagtcctaaaaatacctgtcattcctgataataataataatccatactaagtcctataataatccatctcttgattttttagagggtgtgtgggtgcgcacgtgtgcttctatgtgcatgagagagagatagagaaagatggcgtttactggttaggaaaataattaattcaggaaacaacagaaggccaactggaaataccgagcaatttccagatcctgaggttagggccagaccatgtgaaaggacaatgatcaatttgtacatctgctgttactgactgccactcttttaagaatgatggcacacatgtttggaagatccttgaaaactaacttactttttaaacactgtcaataatttccttttttttttagaaatcatgtttgaacgccgcatgttctcactcataagtgggagttgaacagtgagaacacatggacacagagggaggggaacatcacacatcggcacctgttgggaggtcgggggctgggggagggatagcgttaggagaaatacctaatgtaaatgatgagttgatgggtgcagcaaattaacagggcacatgtatacctgtgtaacaaacctgcatgttgtgcccatgtaccctagaacttaaagtataataataaaaaagaaagaaaaaagaaatcatatttgaagcattgtttttatttcttaggttttgttacattccaataatatttatttttttcttcctttttcttcctttaccagaagaagaagaagagcaggtgcccactgatggaggcacatcagcagaagccatgcaggttcccttggaagaagatgatgaattggaggaggaagaaattattaatgatgagaatttcctgggcaagagaccactggatagtcctgaagctgaagaactgccagccatgaagcggcctcggctattaagcactaaaggggacacgctagatgttgtgttattggaagctcgagagccactcagctcaataaatactcaaaagatcccaccaatgctttctccagtccatgtacaggacagtacagacttggcacctccctcacccgagccgccaatgttggctccagttgcaaaatcacaaatgccaactgcaaaaccattagaaacaaagtcatttacacctaaaacaaagactaaaactagctctccaggacagaagactaaatcacctaaaaccgcccagtcaccagcaatggtcggaagtcctattcgatcaccaaaaactgtatccaaagaaaagaaatcacctggacgttccaagagccccaagagtcccaagagccccaaggtcacgactcacattccccaaacacctgtgagacctgaaacgcccaacaggactccttcagctacactcagtgaaaaaatcagtaaagagactatccaggtaaaacaaatacagacaccccctgatgctgggaaactgaacagtgagaatcagccgaaaaaggctgtggtagcagataaaacgattgaggcctctatcgatgctgtgattgcacgagcctgtgctgagcgagagccagatcctttcgaattttcttctggatcggaatctgaaggagacatttttactagccctaagagaatttcaggcccggagtgtactactcccaaagcttccacttccgcgaacaatttcacaaagtcaggatccactcctctgcctctttccggtggaacctcaagttccgataactcatggacaatggatgcctccattgatgaggttgtacgtaaagcaaaactgggaacaccttcaaatatgccccccaactttccttatatctcttctccgtcagtgtctcctcccactcccgaacctctccacaaggtgtatgaggagaaaaccaagctgccttcctccgtggaggtaaagaagaagttgaaaaaggaactaaagactaaaatgaaaaagaaagaaaagcagagagatagggagagggaaaaagacaagaacaaggacaaaagtaaggagaaggataaagtgaaagagaaagagaaagacaaggaaactggcagggaaacaaagtatccctggaaggaatttcttaaagaggaagaggcagatccctacaagtttaaaatcaaagaatttgaagatgttgatcccaaagtgaaattgaaagatggacttgtgaggaaggagaaagagaagcataaagataagaagaaagatagagagaaaggcaagaaagataaagataagagagagaaagaaaaagtgaaagataaaggcagagaagataagatgaaagccccagcacccccactggtgttgcccccaaaagagttggccctgcccttgttcagccctgccacagcctccagggtcccagccatgctgccatctttgttgccagtgcttccggaaaaactgtttgaggagaaagagaaggcgaaggagaaagaaaagaaaaaggacaaaaaggagaagaagaaaaagaaggaaaaagagaaggagaagaaggagaaggaaagagagaaagagaagagagagcgagagaagagagaaaaagagaaggagaaacacaagcatgaaaaagtaagcagtttctcatttttggccctatctgaacagagtcctagtgagaaacacaggtaaacaaagcccacaattatatctgtattctgggtgtaaatcacccatcacttaagtggaaatatgtttataatgaggttacaaaatttgattttaattctaaaacccataaacctgtaatcaagccctcaacacactagcagatgttaaaaattcatagcctaagaggcatctaatcacagactataaactctctattagctatagtgatctctggcagcttaaaaaaaacaaatctgggttcttaaattgtgaataatatttatgtgaattatcaagtgtactgcattatattttgcacccatatattgagaaaggcagcatccatgtttctaaaagcatgcaaaaccacggcactattttaagaggacagcaaggcccgtggaaggaccactgccttggttttctttttggtgcgccattttggcatgtgtttaggattatgcctgtctacagaactttccgtagcatcttttattccttccgttttctgctttaataagataagggcacatttctgagtatctaggctgatctggcagcctggtgagtgggcagaaagtaatcccacatggcagaaatgtttgaccatctcagtaagtcagacttcatttcatagcatacagcccgacaaactgatagaaaccctgcagttttgtaggcattggggcctcagtcctcaggctgtgacctctgcttacccagctttgcttttcagtctgtggtttcttggattacagcagccggctgggttatttgaaaatttctcataaactttccgaaaaagtatctcttcatagtgccaccccagagctcctgatgatcctttccctgccctctaaaagttatcttctttgagcttggccacaaaataatacccagtagttttgttcatatgataaaatttgatgtatttgacctgcagcagatatattaccaataaattcggagtatttttaacttcaaacttacctagaaaaatgagtgtatttgacagcagtaatggcaactcccatttttcgcctaccttgatttgttctttgttctctttggctatcctaaaatataaaaaagtgaaatgggaattctgatatcaataactgaacattgacaagttaacaagacacagaaatccaactcttatttccattttaaaaatcattttatttattattatgcaatttctatatagtagttgtcaggttttaaagcagatccatacaccttgttttctcctcctaacacacctgtgacataggtccagcaggtattatcatcgatatttatggaagagaaactgagcctgagagagtgacttgtccaagatcaggatgacacagctagcaagagccaggtcagttacactgcagagagacttcacgtggtgaggggtttgttgttagagatactgcctgacagcagttagtcatttatcccttgtgtacctagtaagttggcagctgagccctcagtaaatcaaacaggggactgttcctgtcaccaccatcttcactttggaaagtcagtggagttgtttcaacagccattatgaatttgagtgaagccatcagattaggtttgtaacagcagtcccatgcctttctacagcatctacctgactttagggaagaaaagtcccccagaccaccttggtggaaggcaaaggctcagtccctcgaagcacagagtccacctgagagaaagatacatgttcttggatcagttttgctgggctatggagcaggtacatggcaaaagataaaaatgtagaaaattcagctatcttataagacctttataaataataaatagtaatgtctatagaattagacctgagttcagatcctgacttttgtaaaatgggtaagtcatttatataaggattaaatgagaacatacaaggtgtgcttagtaccgtatctgacgcataaatgtcagtagatggagagagtgttccattctgaatcaaactataaaatgtaggaacctggagattgctgctccattggaccatatcagctagcctgtgttaatatgggcaggtcagctattaataggttttaaaaattattctacttccttggcattctttggaatattagcccttgatacaaataggaaaggataaaggttaggacaacccagggaaatgccattgataaggagtagaaattgggatagtaacataaatgttaagacttccctttcttcaaccccgtttaaatcccccaagcaccacagcatatgagtaaacaaaaatacacctgaaatgcggttccatatggtccgagaattttcctacaaatctacagaagtaaggcaccaaaggttaaactaaagtgagacatatctgctcactttatgtgagcagctttatgtaaggcaccaaaggttaaactaaagtgagacaagctgccccaagaaaatgttttcagccaaaagaatgaaggccacaatctcattttcccttctcatcatcctgaccaagagcaactctcccagacactgacccagatcggcaagcaagagcatttgtttaaatttttcaatctccacatttattttacctgcttataaagctgataccaagaaccaataaagatgtgattaattaaaacggaatttgcatggtaggtagaaggagctttgggctttggaatccagcagacctggaataagatccaggacaagttttttagcttctttaatccttaagtatttcatctttagaaataatgataagaacactaaaaacagcaaaacagtcatagttaacagtgagtaattactatgtgccaaacaccatgctaagcactttaattccttaccacaaccctctaagatagatgctgtaattattatcactttaagatgagaaactaaggcttagagagattagtagacttgcccaagatcacacatctagtaagtgattgaacaggagccaaaatttcaatccaggctgtcagatgctataatttatggtcctcactaccacacttttctatattatgttaaaatgggataagtgaaatcacttggttggtaactcaccataagaagttcaaattgtttttctattagtgatgataaatccagagagtggtgagttgtgcaagcttttagttccccttcgtgggcagtcagacacctagtcagggttgggactctagactgtcacttatttaaaatagaaccacattaactttttataaaacacatgttaatggccaggtgcagtggctcatgctcccaatagtttaggaggccaaggcaggaggattacttgaggccaggaatttgagaccagcccaggcaacatagtgagactgtctctccaaaacaaacaaacaaacaaacaaacaaacaaaaacctattttttaaattaactaggcatggtgttgcacatctggagtctcagctgcttgggaggctaaggcgggaggatagcaccactgcacttcagcttgggcaacagagtgagaccctgtcttaaaaaaaaaagacatgttaagagcacttatattatccaattgcagtcacagccataatagttgtagcagtgataaatctaacattacatttcagaacagtttaaaattgctattaatactgtcacatttgggattaagtacaatttttaaaaatgttttattaaaattttggtttctgtgtgggttggtgtatatattgcatggatctttggggtttagatgagtatacaggattactttaattacaattccctcttgttcttttaagtgatttttggagggaggatcattttgaaaaaataaatgcatttttaaatttatgttagtggaactggatggttatacctatattcttaaatagaaagtaagccaaaatccatctgtcaaagtgggggatctgtttttacattcgaatatgatctggaaaggcacagtagagtttcaccccaaaaatgctgacatcacccaccatctgtagataagtaagtccagtgctggctgagggagcatggctttggcagccacactgaccggggtggaaattccagctctgccacttactcgttattcaccaacctcccatcctcgcagaccctctgcttccttcctccgtctccttcctcccattcaaaactaggaagagacagcagcattctaaagtttaacttatctctgcttaaaaacagtagtttcataccttctcgaagaatattctggcttcagaggctttctcttctgccttctcttagaaaacaataaatgaagagcagtttgtgtcatttaattaagataagtagaggactacaacagttcctgaattttcatacacatatccaatagtgttgatgatcaacccctgcataattgggagttgtcgacaatggaaagcccataaattctagaaaggattctcaacattttttatcctgttgattgaggaattgttttatttgaactttggctactgaataaactaactcgatagtcaacagtgttagcatctaccacctcttgagtgcctacaggttccaggccttgccagaattcaatgatttaattctcccaacagctctgagggtttggtatagtggttcctgttttacagttgagaaaactgcacagaaaggtcgagtaccttgctgtagccagtgaggggagggggcccaggcctgtctgcccgaggcctgtgttgtttactgcccagaatggccttctcagccacttacctcagtctgctttggtgacctaagtgacaaatgcaaatgagggggataggaatggtttgatgcttgatggcaagggcacatcatgattttataaaatgttagttcctggagataccttagagagcacctgtttaaccgccatattttaaagagcaggaaagggatatcctttacactttgatgactttagcaatcagaacaattaaaaattttaatgtttctttatccccaagtcctgtaggatttgcccccaaataatcttttattaaatttaaacggtttgttctttagagaatgataaatcatctaattggtttgtacctttaaggaagggttttcatccttttcctcttttgtttaaagtaatgtagtctcattccaagtcttttctcatcagctattgtaattaattcgtgaaatgaagggttttttttgtaaataaacccaataaaggggagggaaatgtttccttcctgtttctcataactgtatgttccaagagaaaacaagaaacttaatgtttaaatgagtatatttaaatttgtagttcacccaaggccagctcccagcctttctgactctacactctgagcacggacgggaaagctcatattctgtctcagctgtctacatggggtggcacttgttatacttaaccacaactgcacatcttctgactctctgtttaatattttaaatagttatcagagtttacttagactgtgtttctaaatggaaataatgtaaagaccttaattgctgagaaatacaagatggttacagccatagttcagcatccaaatgttaggttattctgttgagctttcatcagtactatttgtgagtttttttctaacataccggcatagatgggaatctgaactagcgcttgctaaatttgctgctaccctagctagtatacatatatggtgttttttttttttttaatgaaaggagtttaacattaaaagaataaaaaaataaaaaaccttggacagattatattgacaaagctgcccattacctttgcagaaagtccctgtcaaaagataaactttaaagctggaatgcatgaaagagttccaagatagaatttaaatttgaactgattctttatagataagctttttaaaaatccacctctttgcttcaagtcaggattttaaaaataaatttcccctttaaatctcttgagcgattttcattttttgcaaggccgcactgctggtgtcctggaaaaatggagagttagagctttatcagttggtgccctgaggtgtgtggcgaagaagctaaatccttgaagattaacaaaaaaaatgcagcacatggcaataaggggcttatatgactactagtattagttcaggtgaaagaagtattgcttctacataaaactggacaaatccactgacaatgtatttttagttacctacaaaggagtcttatattgctggactttacctctttggtgaattgggaagcttagtaatccactgtaaatgctcttctgtgtgccccaattctcagcattactccaaagtgctgttcttttattttaacccttaaaagctcatcgtggccccagattttggcttgatgccattaaaagatggcattagtcatgttgtctaagtgattgaagtcatccttttgtttgttgtttttggtaagtgcatgtgagaaattattttatgattgtaggaaatgcctctgtttttattttggtgagcacacagataaagttaatggaaacaaaaatccgggaagaaattttaatttcgaaattgtactttctgtatgtatattattagcatcctcattaatctttttctacaatcccttgaattttctcaagttaaatctaatttaacttgtttttaggaatgaaataaaagtatttaagtagtttttagatatatcctggtttgcctgggacaatcccagttatgtggtataattaatagctccctcttttcctgtcagaggcatctgtgtttagatgatacaaacactgtaattacagatgaaactttgagccgagatagcaggttgtgaatcattcattaattcaaccagttgactgaatacctgttgccttccgggcacatttataccattttaaatctcacttatgtgtttccacttttgtttacttaatttttacatattgtattatttagggtttttttatagtagataataaacagaccatttcttgattcctttgtcctgccaagccatttaagacagcgttgaaaacccagctagtttggttgagtgaaggtggggccaaggttaatgtcagtttccatataaactagttagcctcccatggagaacaaaatttacaactaaccccagccatctcacaaatatttatcataagagatattgacaaataaagtgaatagctccatgtaagccatcaatattaccagaaaaaggactcacaatgtgcgtcagagagttaaggagcagtagggtgaacaggggatgaatttggtgtcaggagacctggatttaggccatttacttactaactttgtaactctaggtaaagcacttactccttctgagctcttacatgggaataacaccatccacacctaccctatagagttgtgaagatagagttgaataatgtaaataggacacagttcaccaagtgctatacaagtgtaagttatcattattgggtgttatggtaataaaaatgggccaaacacacaactcaataatagtagagcagaatttttttaaaggtaggtcaaacagctttattttaaaatcgagcttaagaaaaggttattggaatgcgtacatgctagtgttgtcagttgaagaaataagaaatatcacttctaatacctcatcactgatgactgtgtaaccctaaaattgttagagttgaagaatataagaacttcatataatttttcattctctgaatcaaaaagactgcattccgtctcagttttgctatttgtgtgacctcagaagagaaaaggaaaacaaaatggaaaagaaaggaaaaatggtttctccatatatgatcagtttacctgtaaaatgaaacccacattatctaccctacatgtttgttttttaaaaaccttaatgagcacattgggaatataaccaagcacaatgcctggcaaattataggtagcttgtaaatgtttgtttatttttgttatatttgtttattcttccacagataacacagaaagatgaggaagtcttaaatagttcataagactggaccatttgttttcagatttgtttagatataaaactcttcatttaaaaaatatattggagacagccaggcacggtggctcacgcctgttatcccagcactttgggaggctgaggcaggcagatcacgagatcaggagtttgagaccaccctagccagcatggtgaaaccctgtctctaatacaaatacaaaaagtagccgggcatggtggcatgcacctgtaatcccagctactcgggaggctgaggcaggagaatcacttaaacccaggaggtgtaggttgtggtgagccaagaacgtgccactgatctccagcctgggcgacagagtgagattccttctgaaacatacacacacacacacacacacacacacacacacacaaacacacacacgagacttgaatgctaactagttatgcaagggtcttgctccacccgccacccatccccctcatgacccttgaccctggaccatactgtctgcaggaccaggtaaatgaaggagacatcagccaagagtgatgttggctagggggaaggggcggtttgtgggcaagttgatacgttaagatttcagtgtgatgagatgaaatacttataggttatttagttgaaaatgttgaataggcatcttcatattttggccttagtgtcaatcagtgctaatccagaccaaaattttgaagacgtattttaaacttactttcgaaactgtgggcagggatgagatcactaaagaaactgtagcatgacaagaggagagggccaagtaaggttgggtgaaagaagaggagtttgtaaaggagaaggaaggagcatgagaagacctataatgggaaaactgggacatgaggacattggcaagggttgaggaatgaagaagaagtgagaaaacagacaatgaagtgaagattgaaatgtgtgagaaattgttagctagaggttgaagagaagttaagaaaatgtttaagatggagtggagcacatttaaaagtgagatgaaggccgggcacagtggctcacacccgtaatcccagcactttgggaggtcgaggcgggcggatcacgaggtcaggagatcgagaccaccctggccaacacggtgaaaccccgtctctactaaaaatacaaaaattagccaggcatggtggcagctgcctgtaatcccagctactctggaggctgaggcaggagaatctcttgaacctgggagttggaggttgcagtgagccaagattgccactgcactccagcctggcaacagaacaagactctgtctcaaaaaaaaaaaaaaaaaaaaaagagtgagatgaaaataattcgtggaacagaaagactgaagatactgtaaataagcagatgatagagaaagcttctttagaagacagcaggagacagatgctagtgtaattgtgggcacagagaagtttgtagggaattgacagagctctccttcaatactggtggcctcaccggtatttcctgtggagttagatgtgtagaaggggaaagaaggtcatgggaagagtcttgaaagtgctaaagattgaaatcattgcttcatattcatgctttacacttatcttaagacttactagggtcagatcctgaaacaggcactagaaaatagcagtaagcaaaacgcgcatggtccctgcccttagctgggttagctggtaaacagctagtattggaggcatacatgaagctggaattaaaaatgttctttggcatcactcggtgctctaggggatggttttaggttggtcctggatgtatggtggaataactaagaggtaaaagggttggggcaagataagttgataattcaacaaatgtctgccgagcatctcctgcatgcaggcatcatgcaagggagctgtcgaagcagtagatcttgatgggctgagggatttgaaaaacaactctaggaagagacagataaatacatgagagaaaataatagatttgatctacatgtactatattaactttatgatatgttgatcattattttatgtgttcccctttagaaccactatactgttcaattatgatgtaattcatgagcttgaaatacataaattaatgttgcagctagtcagtgactaacagtaaaccagtgacattaaacatctggcagtgcttgggacagtgccttacaacaaagaaccatcccaccaaaaataccaatcctacagccccaccgaaagacttggagatagacagtaatttggaaatgcagagcttttgtttagcttgttaattcaaaatgttgattatatgatctgcaaaccaacaattgtgaagagaccctttaacatcagacttagtttctgtgttctcttctgacgaacaggtcagatctttctgaggtctttatcttatttggcagccattgccttcaccacaaatccattccaaaagagaatatctgttttcgttttctttcttttttctttttttttttttttaagatggagtcttgctctgtcacccagggtggagtgcagtggcacaatctcagctcactgcaacctccacctcctgagttcaagcgattctcctgcctcagcctcttgagtagatgggactacaggcacccgccaccatgactggctaatttttttttttttttttttgagacggagtctcgctgtgttgcccaggctggagtgcactggcatgatctcggctcactgtaagctccgcctcccgggttcacaccattttcctgcctcagcctcctgagtagctgggactacaggcgcccgccaccacgcccagctaattttttgtatttttagtttcaccatgttggccaaactgatctcgaattcctgacctcatgacgcctgcctcaggcctcccaaggtgctgagattacagacatgagccaccacaccctgcttgtttttgttttcttttacagcatttcagattgttttacccctagccaaaaattgaacagttgaatggtacaattacacttagtatttcaactttctcatttgataacgcaaacttaagatgagtttaatgtttgtcaagttccataaacagatgcttttatcttatagggaagacatcatcgcagttttttctatttatattaagtctggtaattatttaaatgctccaccagaaatgatctaggtaacaatttttgtttaaaaattttaacaatataattaagtccaaaagttaacccaaacaaatagaaataactaccatatttatatagcatgattaaagtttgcagaatttctcatgatgccaggtagccttcagttgtacagaatggcccagattgtctttctgtctaaattttagccatatttaaggcttcaactttttaactcagtttgtgagagtgggagagtaggagaagtggtaggaggtacttttgttgaaaaaccatattgaactttaatgtgctaacttccacagataaaagtggaaccagtcgctctggccccgagtccagttatccccagattaactctccgagtcggtgctggccaagacaagatgtaagtataaacgttttgaatcagggtgaaacaaatgaaatttaaccttctctactctttcctaagggacttagaattccacaagcttctcccaggtatgaacctgtagggtcaagctttatttttagaactcttcgttttcaagtttttattggtttctttcacagagtaaatgctttttgctttatttgacgtaaaggattttttttttcttgttctttttctcttttttaaagactagcacctgacattatttctgcatagtctttaaggtcccacttatctgaaaaataagaaactctgtactgaatggacttactgccacattacacccaggtggatgcaatgttacactttcccaagtacatagtatctgtcaccatgacaaagaacaaagattctctttttgctcagatggcacatggttttattctgtacctgtaaaacaaagaaatgccaaaggcttggagagacagtatgtaatagtcacaactgatgacttagtccacttttttttaaggaagccctagaaatgcaaaccccacgtttgctgtttatttgtcttaattttcatggaatcatcatatcaacccactcgtctttacagttaatctgttggatatttttcttttattcattttttggggaagcattaaggcctacagtactcttacctgatcctaataagataatgaaacattgatttttttttttggaactcatgttgaaaatcattccccttgttctaaaagcatattatgcatcatttaaataaaatacacaagataaaaattctacaaccttacttttcccattaagcctgaaaatgcagtttacattgcaatcaaatattgtgttgaaaataggcttacaaggcattccatttacattcaatttttagccataaaagtgagagtaggagccatgaatttatttagtagagaggacagaaaatttgctttgtattctcagtggttcatttcatcttaaaagttacatgtattgatactgttgcttctgtcagttccacgtgtagtgcaaagaaaaagtccagcatgattctgatgaatgtgagcagagaggcaacttggttttccaggggagtgtatacccctctgaagatttaaaggagaaaatctgatggcttctgtttttctcacctaaattctctggataatttccacattactcttttcggttgtgccagtagagacctaggaaatgcagcaaaaatcctgtggattcagtgcttttgaaaccagctatctggtatacctaatgcccctatcttacctacagaagcatgaagaatgtcctcatcccttaaccagtagagcttagagaagacccaaccaaagtaaatcttccatctccatgcaaattctgcatatgggctcatttctctaagaggaagatgttgttatccatcattcaacaagtacttttctcctgcagtttatatttattcccatgtctcagtaactcaccattacttaatcttgactcccacacagaagtttggcttgctcataccctttagaggaataagatttgttaaaaggcattgaaaagccaggtatggtaggccatgcctgtagtcccagttacttgggaggctgaggcaggaagatcacttgaggccaggagttcaaggctgcagtgagctatgatcgtgcccactgcactccagcctgggcaacagagccagatcctgtctctaaaaataaaaaataaaaggcagccagatgcggtggctcacgcctgtaatcccagcactttgggaggccgaggcaggtggatcacaaggtcaggagatcgagaccatcctggctaacacggtgaaaccccttctctactaaaaatacaaaaaattagccaggtgtggtggcaggtgcctgtagtcccagctacttgggaggctgaggcaggagaatggcatgaacctgggaggcggagctttctgtgagctgagatcgcgccactgaactccagcctgggcaacagaacaagtctctgtctcaaaaaatgaaaaaaaaatgaaaaaaaaaaaaaggcattgatagttatattcaactcacctgcctttaagcatctttcagtcattctgttgattatttattctgttttccccctcaataaatcactcatacacctgagatattgaaagatatgagaaatcctatttggaacagaatgtctagtatcacggaaattataacacccaggtattctagacaaattgcccttgaaagcatattatatatcatgtaaactttcagatatgtaggtaatgactgccatgttatatgaaggattaatcatttgaccaaaggcagatgcaagaaaatccttataatgaacaaagagataaatgaagtgaaatagattacattttaaattaaaatagagcgagaaagaaagaggactaaatctaatagtaatagaattttatgtaaaataaaacttattcagtaaagtgctttttgtggggtggggtggtggggtggggggtggttctaaatcaggggtcagcaaattatgggccaaatccaggccactgcctgttttctgtgacctgaaagttaagaatgtgttttatatttcttagtggctggaaaaaaattaaaagaagaatgtattatgacacatgaaaatatgtaacattcaaatttcagtgatcctccgtggttgtagcatgatacatggcttagtccatggtgataatggggagggaggtgacagattcctgtcactgtgcctgtggttacccagtttgcacacaccttgggggggaataatactcttttgaagtgaaattaatgagcagactgggattcaaaagggggagtttgaatagtccaggggggtatttattgctgaagaacaggcagaatcatcttttgaaattaggaaaaacgaaaaagctttacagggttcaaattataccttctagttggaagatctttaagacagtatttactttctgagtcttaaataaagcagttatgtcttctgcccttgatccagaaaagtactttgagcttggattgtttcctgtgttccctattattgttccttgaagcaagacaggaataacttgtttttcccttgatttaacattcctggaaactgtattctaaaggagtcaatggtgagtccaggacctcctcctgatagtgttaaaattcaagatgactttccaaggacctcagattcctttaacagatcttccagtaatgggtgtccagagttccctgtagtctatattgaagataaaaccaaaacctaaccctgaaattacagtctcaacacctagagacaacatatccaagtgaattgctgaaatatctggtccagcctagcagaagccttgccttgatgctgggatagcaagtaagtttcagcttgcctcagagccactgcctgcaactctgttgatgggatcctgaggtcccacttggacttggggctgggagcagggtgagtgtgacagccaccatggaggccagggcaggtggcaaagcaggcaccaggttatttgtcctccccatcttactgtgtattgagtttggtcattttgagcaaatgtaggtagaattggctaacttacagtgttcatccttttcctcatttctgtcaagaaaataggagcaaggtaatgtgatggattttagggacaggggctgtttggatggaactgtcaagaaagacttggcagaatagggcctgcaactcttctataaagctcaaattcaggtaaaggagctttgtgagaaaaaggtgaaacactggtaaagtattaacaaaaaatacaaatttgcataaagatttggggctgaatatagggtagaggaataagcattcttcccctcagatttctcaaacgtctcttttgctgctgtcttctcccaaggactgaagaggaagcctcctccctcttccatctattcacccacccttgccctcgggcagtgggtcccccatgcccaggtccatggtgagcagctcctcctcctcctgctttcagagcactcctgcctttatcagcaagcaccagagaaggggtgactggttgggcccctctagacatcccatcatgcatggtcatgttttctctaataaatatctcataatatattggatcaggtgatattggaaccatttgagatgcctttcagagaacaatattattatcaatggtaattctaaattccctttgagagttcacagtaggtattctgtttaacaaatataactcctttttcaaaatatacaaattatgtcaagatatttttcagaaaccactttacctctggcattagttttctttctgctgacattttgatttctggtggcaagtggattgatttcttacaattcagtaacttcatcatcagccctcgtcctaacaaaggtgctgagaatgtgatgctttcctttacatgtcatttacttttttttgttgcatttcacagagtttaacttaagccttgtgggggctttttaatacttgtaatgtctaaattttttctatatataatgaaaatgagagctaaagctttgcttgttaatctttaaaatcaatatgtatagacacttgtctttgagtgatctaaacttttccagttaatgctttttgacaatagtagtgaagaataatcatgggcagttacaaaaataatcatttaaaatatttttaaggaaaataagcattttatattttaaaatatagccagatttagccaaatgacattcaacagagtgaagcttgcagtggtattttagtgaaacattctttagagaaataatagtaaatgttttttatctcactttctgaattttcctttctatacttgaagtgctttttattcatatataacttttttcctagtctaaacaaatttaggggaaagtaaagagagtatatatagtacagtcggaaatagaaatagatcttcttccctaagatcaagggaagaaaaaagaagcaaatgattgtaggtcaaatatgatcataccttcctagcagtaagggcaaaaaaatacatttttaaaattaatttgtttttatttatttatcttttttttgagacagagcctccctcactctgttgcccaggccggagtgcagtggtgtgatctcagctcactgcaacctccacctcccgggttcaagtgattctccggcctaagcctcccaggtagctaggatttcaggcatgtgccaccatgcccggctaattttttgtagttttagtagagatggggtttcaccatgttgcccagactggtctcaaactcctaacctccggtgatccacctgccttggcttcccaaagtgctgggattacaggtgtgagcaatcttgcttgactgaaatacatttttttttaaaggaaggtgtttcactttctcaggagagagtttttcaaggcagtaaatttaaaaattaacttctatgtgggagcagatgacaaagatggtgtcctccacagcggtttttataggtgacccaaaggcattttttgttgacttttgcacactttccaagaggaaagcatgaaagaacagctcagtgctgacagctcttaagcacctcttcatctctagtggaaacactcctatttccttttctgaactgtgttaatcaagactcttggtggcaagtaacagaaatccaaatcaaaccgtcttagaggggaaaacagcaggggtggatgtgacttcggcggggccacctgcaggcttgccaagtatcctagggctctgcccaccctcctcttctcatctggcctctgcggtggcagaggtggtcctggccactcaggctgttgtgattcttggtgctcacagtccctggcgaagccccgcttcccgggcctccgttatcagcccccgtgaaggacttcgcttcagcagcccctgtggtagggaggctgccctgtcagaaggggaagtggtaggttccagaaggaaaggagggctcacaccagaataaggggcaagaggcaggcaaaggcgatttatatgttttattgtagttaggaaaaggctgtcagttttgcatttttataaaagtgtcctggggaggcagggcaaagaacctagttggtgtacaaaaggatactttagatgtaacgtttgggaacatttcagaacgtcatcctgtcagacttggaaggccttttgcttttctgtttttaatattttcttcctaacaaaactgtctgcttttgatttaaaaacaacaacaacaacacaaaaaaagattaaagaatgttggagttttatttttccctgattaacttgctacagaaactgaaacatttcataggtattttgcctacgttaaaagctaaacatcatgagctggacgtagtggcgtgcacctatactcccagctacttgggaggctgaggcaagaggattgattgagcctgggaactcaaggctacagtgagctgtcattgcactgctgcactccagcctgggggacagagtgagaccctgtctctaaaacaataaataaataaataaataaataaatttttaaaaagcaaaataacaacaatgacaaaaagaattttaagaatgactggtgaagttcacaagtgacatttaacatttttaaatgactgtatttaaaattttcaaatgacctatttttaatgctagggaaagatgctaacattaccagtgaaattcctaggctctgaacaactgcaacaaaggttgtgagtttgatacgtcattcttgctaccttcctgtacttacaaattcagcagtcccaaacccatagatcttcatcccttttctgatttttccagaaaaggagtttttgacttccttatattactgtcttatttttaccacctagaacaatgatatagtctctaaatttagtttttaccccggcacaatactgtttattcattaacaccaaagatgcaatatgtttactagaaaaaaatagtaaactgtcagaaaaactggctttaggttttcagaaatacttttactgcacagtaaaacaagtggagagattataatcaaagcatttccatcttacttgtaaacaattacagcagttcttacatagatgccgcattagaagactcaggaaaatttactggattccattctaatgcaattagagctaattttgttctttaaatgaataaaaggtcagctagtaaatctagcttatcttgagtccagacttcaataaattgttttatttaatttgttgtaaaagatcttatccttaatgggtccaggtcttattagttcccttaggttttaaaatatttatgaccacctctttagatatgatttgaatgatagttggaaactttctctccgcagtgttatcaaggtccacgatcactaattgagtgaatataggaaagtacttaagattcattatctagaaaaagctgatgtggacttccagaatttaaatgttccttaacctgtgacaggcagagataatttagctgtatcatggaaaccttttggatgctatctgattataatttctcctaaagatcaaactactcacacttctggcatttaaaaaaagaatatgtttcctacagatgaaaacacttaggcactctttattaccaagaacatggaacgtttcaatcctttgcattctgttatttcctgttatgttatgggcctatactgtgttcagatacttacataaagattgcagctgcatggtgcaacatctcttcgcttttcccacgcctgcctgcatagcttctagagtgaatatccacgtcactgcaggactgctgtcatttagaatatgcacagtcttttttaatgtggtagccacaagtctcagcatgtggaactgcctcgccatgttaccccagctgattagacttgccttttgggttccaaaccttcttacatcccccacggcttgtcgtccaggctctaggaaagagtatgtgtctatggtcagccctcctcagctgctggcctccattcctaccttgcctgccccggctggaacttcgttccctctcttagctcctctcctctgtgtcttcctcttcttttttctcatttttgtccagcctttcattctcccatgctaaccctcctcaccttcatcaagccttccctctgtatgagaaaaaggctatgtaacatctgcttttcatgctgcttctcaaaacttattctttagttttactttcttctaattgttcactcctaaaccttctgtattctggtttctgccctagaaacttttctacagcttcttgttaagaccattagatgcttcccaattcccagttccagagaacatgcagcagctcttattgtacaaacccggtctgccgtttggacactgtcccctaagccctttcagaaacttcctgttcctttgatttttgtggtactacgctagactcagtctctcattctctctctctttttttttttttttttttttgagacggaatctcactctgtggcccaggctgaagtgcagtggtgtgatcttggctcactgcagcctccgcctcctgggttcaagtgattctcctgccttggcctcccgagtagctgggactatgggcacccgcccccacacccagctaatttttgtatttttagtagagacagggtttcgccttgttggccaggctggcctcaaactcctgacctcatgtgatccacccacctcggcctcccagagtgctgggattacaggcatgagcccccatgcccagcctttcattctctcttaccatggattccttttgtttttcttttatggacttattttttttcccccttcttttctttttgcccttggtacagtaactctgtttcttcttcgtaaatgttctcattttctctttaggtttgttatgcaatgatgattcccatttctttattactagctcatatttctccttcaagagtcagactaatctgccaagttactggaaagttctgcctgggtgaaccagcagcacctcaaaaatagcatttccaaaactgaacccagcattatttccgccagtgtggttcttcttctttttcgtatatgttggtgatgagaccagtgcctccattttcaagccattttgggcattagggtaacttgaatggaggcaaaaactatctaatagaattgggagattttctttatgtcataatgtcagactgggtgtcctgaaaacaaagataaatgtcttcttagctccaaaagtttcccaagctgaacaaaaccaaggaaaggccttgtcctagaagtctcctttgatattcacttggactctcagcatcttgtaacttccgctcagcatcttcaagcttggctgtctcctccttgtctagacacaaatggtcaggtcagtagcagccaatgagagaaagaagtccatatccttattcacagggatccataactcaccccaagcaaagataccttcagctaagaaacaggggaaaaaaggatatgtagctaggattttaataaatgaagattacataagaagatctgagaagcaaaacacttaaaagtctgatcaggacataataggctttcaaagaacagattaactgcttcaaaatatgtaacctagaaagcagaagtttcccccacatctcacccttcccccaggttaatcactgctgactgtgccgtgtgtatttcagcaatttttataaaaacaaattaggggctggacatgatgactcacacctataatcctagcactttgggaggccaaggcaggcagatcacttgagcccaggagttcaagaccagcctgggcaacgtgacaagatcctgtctctacaaaaaatagaaaaattagccaggtatggtggcatgtgcctttagtcccacgtactcaggaggctgaggcttcacttgagcctgggaaatcgaggctacagtgagtcgtgatcatgccactgcacaccagcttgggcaataggagtgagaacctgtctcaaaaaaaaataaaaaaagaacttagaattatcttacacatactgttcagcagcttatcccctcccctctaacagatcatgaacatttttccatgtctgtatgacatggtatttcattttactgttgtatcatcatttatcttgccagtcaccagttttcatacatttaagttgtcaaaggttttgctataacaaataaagaaacaacatcctcatatatagatttttgtttattcagtgttactaggtcaaagaatgtaaacatttaaaatgtttaagagattattatgccaaattatcttctaaaaggctataccaattaaaattctcaccagccgtacatgaggatgaaatgaccctatatttaagaagaattagtgaaatcctattgttctaaaattgagcaagactctgggcaactagtagtgaatttatatgaaaagctagatccattcttctccctcgtgggcctgtgagttcatttcatagaaatcctttcttctttgggggaagctattggttgaagaatagttaacatctttattcaggctattcccagatctcttctgaaatctgtaggtccttggtgctggctccgtctcaggtgagtttttcttcattaagtgcactactcatgtgaacataatactacagagaattgccttctctgtgatagtgtttgtgctttggagtacatgtatcaaattcatctgtgaaggaacctgggaaatattatgaatttagtcataatatttataagtaacttatgtttgtaagtaatgtttataagtaaccaatttttaaaaacagtttttaaggccaatatatttgatgttgttactgctattaaatcaaggttatcagggctgggtagggtagctcatgcctataatcccagcactgcgggaggatcgcttgaggctgggagtttgagaatagtctggacaacatagcaagatcgtgtctctacaaaatattaaaaagatatccggggctgggcacagtggctcacgcttataatcctaacactttgggaggccaaggcaaacagatgagttgaaatcaggagttcgagaccagcctggccaacatggtgaaaccctgtttctactaaaaatacagaaattacacctgttatcccagctactcaggaggttgaggcaggagaatcacttgaacccaggaggtagaggttgcagtgagccaagattgtgccactacatttcagacctgggcaacagagtgagaccctgtctcaaaaaaaaaaaaaaaaaaaaaaaaaaaaagaagccagatataatggtgtgcacctgtagtcccagccatttggaaagctaaggcaggaggaccacttgagcccaggagtttgaggctacagtgagctgtgatcaccactgcactccagcctggacaatagagtgagattctgtctctcagaaaaaaaaaaaaaaaaaaatcaagattatcaagtaggcattttctttgttttttattttatttatttatttttttatagtacccctctgttttggaaataagtatctattataaatccctgtgtaaaatggtacattgtttgtactttgcacttaaaagtttatttttatataaatatcacagtaaaaattttttctgtaaaaaaaatgtgtgtcctatttgttgcctgttttttagtcattttatagattctttcctggtgttttataaaatatgttttatcagacttagctttgccccaagtggtggcagggctggtctattgtgaattcaaagcatgtgatctaccaagatttcaacccagaggaaatgggcctggaagtcccagagcaagctctcagtgggccagctgagatcacgtgaccagcctgaaccaatcactgtgcctgtggagacacggtggctctgattggcctggcttatatgtgttgcttggatctagaggtaggataaagcccactcaggccacatggacagaaagaaggaagagagagagggctgaaggcaggggcaaggcaaatgggtgctgtgtagagacaggcaaacccagcagatgccctgagcctagacctctggtatgctgaatgctggaagccattgggtttacttatatatatttcacggtgctgagaaacatctgtttgcattatttatttgtgaatcattcctaatataaattgtgttgctgttttaaatttcctatgaaatacgtttttaagtatcacgatattgcgtagtcaaatgtaatattgtttttgcacatggttctgtatacatcatagattctaaattaaaacttttgatagaaattacaaaatttgtgttaccttactgtatgggcatatttaaaagctaacatcctagtttctggagattctgatctaccaatatttcccatgctgaatcataagcttcagcatttctttaacaatatctcggcgtttggtataaaaccctttgaccccagatgcagagaatgattgttagttaggtaaaaatgagatggtgactggtactggtccattggccaaagtttggagcataatgttcctggtatatgtatgtcaactctggctgtgatatcatatacttacctggttttatttttataactttgtacatgcatcttgaatataatatttttctaaagtttattataattagaagatctttaaaattccctttaaaattatattttttctaagagacccagttaaaattaactgtatctatttttaagagattgttttagtttctagtttagattaactagtagagcacttctggctaatgtttgatattagcctggttttgaatatatctctaatgtgtgttataacccaactgagaaatgctgcttgatctgtatatgaatacgtgagttctgctaaaacactgaggaaccttgagagtcgctaatgccattagggttatttgttctgaacggaatgaacagaatgagtaaatcacaattgtgagtggtaaatggccatgttctagttttttttctcatcaaaccatttaaagccaagtgagcaaggcagaatggctggctacctttttattgtttttgtcattttgtttatttagcttataatttaatacaaggaaatttgtatctgctttatatggaggctgccttcaaagtacgtggtcagggtaaattttgaatgaccgctacatcttttttctcgccttgctagcatgaactgtttttctgtatgcatgcatacatctgtaaatcagtacatgtgctctactgttattatatagttttaaagaaaatacattaaaagaagaaaaatggctcttaaataagaaatgcattttagattgtctggcatttggctgttctgcttatttgtgctccctttacatctaaattaaaacaattcagagattccccatcagttcaaaggtctctgtagggcctgtattgttgacatgggtgggagtggagtgaagaggaagaggagcacaggaggtgcgttagagagtcctgctctgagcccttatcccatagacctcctcacagaagacaccaggctgactcactgtcctgcctgcttgtcatgtccctgcagctgaggctggaaacttctcgagcccctctccgtagtcctagatgttaggggcagaacctggaggagacagagggctgggacccaaagcagctctcagatgccttcaacccttttaagaccttcaaggttaggagctgcagtgaccttctcttttcttttttttctcttttgtaatgatctttcatgtgaatctgaagtcagtgtaataatttcagtcgtctcgtcttgcctcagagaaaattttggaaactttcttatgtacatagatacatacatatatatgtatagatacacacacacacatatacatacatacacatccgtatgcatgtatatataataagtgtgtatgtgtgtgtgtggttttgcttcaaactcccttggacacctttttttaaaattaatcttcataaaaattatttaaattctaaagcaactcaaatgattattcattaaataatttattaatgtttttgtaactaatttatttctttgcagtatggaaaaacacattattttatttcatcttatattttacagttactattgcaccattgttttttttcccaaacaaattgttaaaatcctcttcattctcattttggaagatcatttgtttattaacagagatataatattaaacaggcaatctcagagcagaatgacagcacaaaggtcaggagtgtgatatagatttatacacatacacacatgcatacataaacatatatagtcacttcttagcccacacagatgaatatatgtatatgtatgtgtgtgtctatatcacatgctctaaataagtatatatacactatattttttccatcctatttacaaagtacaataagaattcatataaagcatggtgattttggtgaagacctagcagcttttttgaattttaatatattttgaagtggtaatgttggattttccaagcatgacttcagtaataactgaattttataactctccagtgagatacaaatcttaatcacaatcttgttcatttttcaagttcactgcatatcatcttattacctttaatgttttcaaataacttgggatgtcatttgatcctaaaaataaaaagtaaaggtgtatcttttatggctaacttacaaattcattttcatgtgaaagcatcttttactaaataattacccatcctcctctatagactgtaggctcagggactacagaaagtaaagtttcatccatgttgaatgttcaatttcatttggctttgctttttcatagtaaaagcaccctcttgtttgctgcagagcagcaaaagcctttctgaaatcacaaaatcttttagaagttctgactccagagaatttggttttgaaaggaaccctcaaagtaccccagacaacactctctgggtttacattttgaaaagttgatctgcatttaacacatactgattttgattacatacataatgtaaccatgtcaaaggtagtagacttgaaaatagtgaatttggatcagatgttaattctctcaggagcataagtaaatatcacagtagacggtaggaagtgttaaaggctggaagagatacatctaaaattataaagaagttcaaggtgattactcccaactaggaagggctaaagaggtttggggaaagtagaatttgagtagagccctttagagtgagtaaaatttagaaatggagaaatgtgaagaaaaaaataaaagcaaagatgtatggagtgaaataatgaatgcacattttcccctaagaaatttccgtagtattctgttgacctagtagttcatatgtgccctagttttatgattaatgatctgaaatcattctggattgaacgcatattaccaacttctaaaaaagtttttattaatattttcaaacataaaagagtaaaatgatacactttcatctgctggcaacttggatagatttaacagttatcaaaatgttgccatacttgattctttttgtctttttattcccaacgcatttccaaacaaattcaaaacttaatatcatttcacctctatattcttcagtatgcaactctaaaaatatggttattttctcatataatcacaacgttattatcatacataaaatatacagacattttccttgttaccatctaatacctggtccatattcagatatctttatttgtctcaaaaatatcttcaacagtttaaccaggatccaaaccagacttatatctcataaggacttgtaatctagacctgttatttttaatccacactcctacgctcctcctccttttttgcaggggaaggggatgagttcttactctgtcgcccaggctggaatgcagtggtacgatcataactcactgcagccttgaacttctgagctcaagccatcctcccacctcagcctcccaagtagctgcaactacaggcacatgccactacacccagctaatttttttattttttgtagagatggggtcttgctgtgttgcccaggatggtctcaaactcctgggctcaagcaatccttctgcctcagcctcccgaattgctgagattataggcgtgagccaccatgcccagccgcttcctttttgccatgcaattgatttgtttaagaaaccagatcttttgttcagcagaatatctcactttctggatttgtctgtttacttcttcgtagtgtcatttaaattattgttctatccctgtaactggcatttagtcctaagtgcttgattagatttaagttcattctttttttcttaaagggtattttgctgctatatacttcttattacttcagatcagtaggcatggaatgtctgattgtcacattcttagtgatactgaatgatttcattgggaaattattttttaatctagtcattcctttcacatgtattagctgaaattcatccctaaaggtgaacctcagcgaccctgaaatacacctcatacaggagaggcaggataaatatacaatcttttttttttttttttttttttttacttgccagtcttcagtgaaaagagttgatggagttgatatagttatctccagtgatgagcatagggttttggaaaggggaagggttctgtctctctctgtctctttttctcccccatccctccccctctctctttctctgctccccctaccccttcttctctctcccacttcccctcttcctttgtcccccttcttctttctctttctcttttgttttcatgttcatattgtaccatcttgaccaacgtgaattccttcatgttgcctactgggtttcgacacaacctcatttgtgttggatagctttcttactttctggtaaaaaaaaattccaggtttatcttgcatatttcctgtatattcttgtgtatttccacagatctggaattagcaatttctccaaggaacattggttccttctgatgatgaatggtgtttaggaatcataatctgtcactagagatgcccattgctactgggatgtcattattctaggcctttacaagggacagaaataggaaatagatgggtttgaaaagaaaagaaaaaaaactatgagtttatactgtttccagttcagatttaatattactgttacgtatttatttattgttatttaaaaaatagagatgaggtctcactgtgttgcccaggctggtctcaaactcctgggctcaagcgattctcccacctcagcctcccaaagtgctgggattacagactgaaccactgcgcccagccacatcttttctttcacattagaaatcctgagtcttggccaggcacagtggcccacgcctgtgatcccagcactttgggaggctgaggcaggcagatcacaaggtcaggagatcgagaccatcctggccaacatggtgaaaccctgtctctactaaaaataccaaaaaaaaaaaaaaaaatagctgggtgtggtggcgcatgcctgtaatcccagctactcgggaggctgaggcatgagaatcacttgaacccaggaggtggaggttgcagtgagccgagatcacaccactgcactccaggcgacagagcaagactccgtctcaaaaaaagaaaaaaaaaaaaaaaaaagaaaaaagaaatcctgagtcttaagagcattattataattatttgagttattcaacaagaattatataaaatagcctaaaagtaatagtaccactatcactactaccaccaagattattaaatgaagttaaagactaaggtttttttcagcatttgctcttaaaatacatttcactatggatatgcttacaaaatgctgtcctagagtcacttgtaattatttttgtttctacatggttatgtcatcagcttgatatacattgaggttcattcatttcatctagttttgattcataaggaatttttctaaaacttaactttctgaatatgtggaccatttacctaactccaaagtggaagctgtataacaaaatacattcagagaagtcttgctttcatgcctttttccctatgacctttatactccttattctataggttgccattttggtttcctttttattattatctttctagtgtatctcattgcaaatatgaggaaatgtggattatatatttcttacctgaatattaatgcccttttagagattttatgattcggaacatttgacaatagaagtgtaatcatttaagcatctcccttggaaatggagattctataatggctatattttcccctaattacttcatgcaatttgtttcatttttcaaataggtcatgcctgcattaaaagataaaatgtttgctacttgatatgtacttgagttatgacaagataaaataaccattttatgagatgatgtaaatattaaagaggcaggccacgagcttcaggaattaaatccatttatagttgtgttataattatatgaatgttaaaatttgagctgtgaggatcaagaagaataaggaataacgattgacttgaagaatcaacataaaaccgattctcataattgtctttgggtatttggtgttttttgatccaatctgaaatatggaaatgactgtgttacagtttggcgtcttaaggactggtactctaaatataatttcttccaacttctgaatatttatttacatacctaagttagaaaaatcgaacacctggtgtgttagttttctatttccacataataattgaccctgaaacttagtgatttgaagcaataaacatcagttgcttcctagtttcttgtggttggggatttgggtggttctggctcaggtctgtctgcaagctggtgactgggaccataggcatccagaggcttctgtgagggtagagaagccgcttcaagctcacgcacagctgtcggcaggaggctccggggacctcttcataaggcagcttcagcatcctccccacagtgtagctggctgtccccatagaagccacagcctgttttatgacctatccttggaggtgacgtggttattttcaccatgtgctgccagccatccagctcagcctgtccagtccgtgagggaactgtgccagtgtgtgaatgccaggaggccaaccaccacacttgggcttagtatttctggggcttttcataaaaatcagaaagcaaaaatatggagattatgtgtatgtgtgtatcactgatccagatatgaggttttatagtaatatgattgtgacatttcaatgtcttttttttttgtatttgttgtgaggggggttttttttgtgttatctgtattcttacgttgaggcagggtctcactctgggattttttttgagacagggtctcagccagactggagtacaatagtgcagtctcagctcactgcaacctccacctcctgggctcaagctatcctcccttctcagtctcctaagtagctgggactacaggcacgcaccaccacactctattttttttttttttttgtatttttgtatttttgtagagacgaggtttccctatgttgcccaggctggtgtcaaactcctgagctcacacagtctgcctgcctcagcctcccaaagtgctgggattataagcatgagccactgggcccagccgaggagagggttagtttaaaatacaacatgggaatctgtttctcaaggtggttggtatttctgagattgatcaaaaactgaaatctgaagaagaaaagtaagttttggtgtaaacaatatgttttttcatcgacctgattttcctcccaaatgttgaacttcctgttcaaaagtttctataaaattcatggaagtggttgcgatagtttttacctgtggcatcattttgttaccatttaataatggccgttcacttttagaagtaaataagtaagccattgtaagggaacttaggaactttgtgtgcagtttagtagccagctattcagactttgataatttggattactggtttcatcgtgtttgcacacaatagctgaataatgaggatcattaaacttcttgtgcagacatatccaacttgtgtttgctgctaaccctggaggctctgtgcagctggggaggtgaggacgggctctttattgacttgacaagctgtgagtttgcattacaggccaagcagctcatgacccattctatttatgtcactggtttgtggtggggaaacaggtaaagaaatcctgctgaaaatccctccttctgcacgtttttatgaataacgccagtgtttatagcagtgagggcactgtgatcaaatcctccaaaagctgtaatgctggcagcatggagccattgtgggaccagctgtgggcggtattggtttctctgtgagacattgcttattcaacagaaagctctggacgagaacttactatgcaattaaacaggagagaaaaagggatacttcagagagaaaaatatagagaagcaaagcaccgtctagaagtatgaaacaaataatggttggcaataaaggccagcaggaattcaaaattatttttacaacgatcaatttagattaagtgatgatagtttatctcacaagtgatgaaaaattatatcatgttatactgttaaatgtttttctgttttgtttaaaattaaaaggattgtttttaaaactgttttcggtcatcacaaaaataaccttagcttaagtcaaactttcaaactccagtgaattttctcttgaatttcaaaagagttgggaaaaatgggttactttagtgcctctacaccagtctaaccccttgaaaacaaaaagttaggataaaagtttgtcttgtcaacactgagtagccactttaatgttttttcttttactactcagaaaatctgagtgagaactatatatatatatatatatatgtatatatatatatatatatataaatttaaaaggggtaatgtaattgaactgggaatgttaggcatttttgaaggattatcttattattacaaagttatttttagcaaaatgtcatttctctaaattgaaaaaaatgagaacatatgcacaagcagacatttctgagattttaactattaacccataaaattggtcaacaatctgtttctatctgttggccacactgctaattttaagccattctaatgggcgccattatcaggccttataggtaagggagaaatgtaggaaacatagggagaggtggggcatggtggttcacacctgtaatcccagcactttgggaggccaaatcacctgaagtcaggagttcgagaccagcctggccaacatggtgaaaccccgtctctactaaaaatacagaaatcagccgggtgtggtgatgcatgccctcaatcccagctactcaggaggctgaggcaggagaattgcttgaacccaggaggtggaggttgcagtgagccgggatcgcgccactgcactccagcctgggcaacagagtgagactccatctcaaaaaaaaaaagaaaaaaaaagaaagaaatgtagggagaaaattaaagggcactggaaaagagtcaggtaaggcaaataatattcattatgtgtttggtatagctgaaaacaatgtaaaaccatttccggaaaacagaacaaagccttcaggatctgattgtacctggtgttgggaatgactaggtggctgaggaagtggaatctgtgttggcaaacagaaatctcagtggtcctgtgactcattaagcagatggaaggaaggtaggcagggaggaaagaacagaggaaatggtcttgtattttaaaatattttaaacaggcaaaaataattcttttacagaagtgttctcactgcagtagtaggtattctatttaaagctgattaatatttcttgagctgctgtgtttaatactgcaagtaatccaaagacaagatacaaatcttactcttaggaaattgactgtctaatgtggatgagagagacagatctgcacacaactgggacacaaagcaactatgggcaatgtatttctttgaaaaggcaagacccaaaactacgtaccaaccttaatgtctaaaggctgttaaaaaaaaaaaagaaagaaagaaagaaagaagttttttttttttttttgagatggagtctcgctttgtttcccaggctggagtgcaaaggtgtgatcttggctcactgcaacctccgcctcccaggttcaagcagttctcccgccccagcatctcaagtagctgggattataagtggataccaccatgcccggctaatttttgtatttttaggagaactggggtttcaccatgttggccaggctggtctcaaactcctgacctcaggcagtcctcctgccttggcctgccaaagtgctgggattacaggcgtgagccaccgtgcccagcccaaatgtattactttatgtacgaaaataccatcattgtaggaggttttctcttccccctcctttgaccctgtccttgttggtctgctatggatgatgcactcaacttagacgcactcgattgtgcagctccttgatctcactcagagctttgaatttcacaaaatcatagtaggactagactatggtcaacatttgcctggaaggctttttaaccaagctatcattttttccccagtaaattaataaagtgtaacatacacacagaaaagtgaattaattttaagtgtataactcaagccatccttaaaaattcctagcaacagtttagacgtatacattgtaacaggcattttcatctttttcgttgttttgctttgttttttgttttttgagacggggtctcactttgttgcccaggctagagtgcagtggcactatctcagctcactcctgggttcaagcgattctctagcctcagcctcctgagtagctaggattacaggcatgcaccaccacgcccagctaatttttgtatttttagtagagacagggtttcactatgttggccaggctggtctcgaactcccaacctcaggtgatccgcctgtgttggcctcccaaagtgctgggattacaagtgtgagccactgcacccggcctttttcttttttttatgcaagttatgtttgttaattatggataaatcaaaaggagaaaaaaggcatccacccagcacagtggcttaatgcctgcaatctcagcactttgggaggccgagatgggaggatcacttgagtccaggagttccagaccagcctgggcaacatagcaaaaccccgtctctacacacaaaaaaatacgtatacaaaaaattagccaggcatggtggcacgcacctgtagtcccagctactctggaggctgaggtgggaggatcaaataagcctgggaggcagaggttgcagtgagccaagattgcaccagcacactttagcctgggcagcagagtgagaccctgcctcaaataataaataaatagataaaacatctataattttcatgtaaaggcaattgctggacattttagtatatattctttcaaacttttttctaagtatacactcataccttcttgtttgctttttttattttcttagaaaaattccatcttacacctccctttttcttggatagacatatcatttgtgtgtgtgcacacatgtgtatcaccacttcagataacaacatggtgtttgttcatcatctatgtaaccgatctcctattctagggtattttaaattgcagttattctagtttttatttttttattttattttttgcagccatagacagtgctacaaatcatattctttaccccagacctttacacagctgtctaatgttgcctcaggatacatttctagaagtggaattgctggtaaagagcttgcacgtttttaagttttccataatcattccaaatactggaccaaccatctctccctttcccctagcctgacagtaccaggtgttgtcaatctttttcatctttaccaaagaagccttagattgtcatgtttatatctttgattactatgaaaatggaacatttttttcttgtctagtggctggttttggtttttttattctattttctacttgctgtttcctttgctcatgtttgaataagaacattaattcttttttattcacaacagctgtttatataagaaggcgtaatgctttattgttgcaagtagtttgcttcactttgtcttttgccttttaactttgctgaggttattttatgccatataaaattgtcgtgcagtcaaatcagcatttccctttatggtttcagcttttggtgagatactagaaattgtgtcctaccccaagactaaaaacatctatatttacttacttttctgggaatttttatggttttgttttcttttacctaatttttaagacgtttagaatttatggtttgtgatacagctccaattttgagggatttttttaattaactataccatccaacaagtcataattgagctaattctcaattgcacatgcgtaattattgcatagtaaagcacatgaacatctgaaaattattgtagacaatagcttcagtctctacctccaacaaacattttccactataacagccggcaaacagtaaagttaaaacgaagtgacaaccaaattctttgcaagcagttttctaaggccccatccgtcgatcctgtgaatggctattgtaagatagaagatgtttcccttgaataacctcctcttgttgataacttacattttcaggcttatttttgcctgcagtcatatttattgatcacaactctcttcttcctatcatcctctgttctctctctttcctgcccctgaaattaactccattaaccaacaactgaaaacgcctgggttgtcctcacacttcctgacctaaaattgtaattctttcacttgctctgtttcttctcttttctttttttctgttttcattgatatcccgtatttctctcacctgtgctttatcccgtcgcacatcgtaaagcatattattatgctttttggcgggagctataattttgaatggatagaaaaatacactaaaagtatcatgtcatctggaaaattactactttctggatcagcttttgtttcttagtttgaattctaacacattttattttaataaccatcatgttaaaagctgaggacatagaaattagaaaggctttttgttcctttgaggaactactgatagagcaggggtaacaaatctgtgtacaaactattcaaattgttttttagccttaagaaattgggtcagtttctttcattgttcagtatattttagaaaagaatgaatattccgcactgattgaagacagattttttttaaatgtccatagagtcaatttcattattcttattcaaacctatatctttgctggttttttgactgcttattctgtcagttatgcagggagataaatatgcttacatctgtggctatgattgcagattcatctgtttcttactgttctgtcagtttttgctttatatgttttgcagatgttattaggtacatacaaattttaaactgttatagcttcctggcaaattggaaccttttatcatcaggaagtagcctttattatcactgatggttcttgccttaaagtcttttttgtgtggtattacttttctttgtatttgtatacatctttttatagcctctcactttcagcccttctattgctagatgttcctctgggcattagaatatattgggtttcactgtttatacagcctgacaactgaatcacttagaccttttatgtgatataatcattgatattttgagtttgaaatctaccttattattttgtgctacttctttagtgttcagtggttttttttctctctctctcttttcttttatcagaccaaggttttttttttatcgttccttttttcctcatattatacgttgtttgtaatttttgtgtggttaccctagaaattaccatactttattcactacctttacactacagtttatataatagagggacattaaaatactttagctctgtttacccattactggcttacatatcattatgttgtgtaatgaattatgtaaacacttggaagatctttataagtcagtgaaccagtattttccaaatgaccaatgtatgacattataaaattatgcatgggtaaattttgtgttcatagtgctaaacagagcaataaattttaatgtaacagaatatgaatgtctgttgatatgatttcagattacacattgcaaccaacttataagaaactatcatttgttgcatttaatgcagcattaaagaagaacttacaccattatccaaaaaatcttttaaaatactcctcccttctctagttacatatgcctacattaaagagatttgcaaaaatttaaaacattgccagtcttggccaggcacagtggcatgcgcctgtaatcccagctattaggtaggctgaggcaggaggattgcttgagcccaggagttcaagaccaccctgggcaacagagcaagacgccattatcaaagaaaaaacaaccaaaacattgccagtcattaccaagttttttgtcttggaaaatatagttattttcataaaaaaaaatgttatctgttaacatataatgggttcattgtcgttacttttaaatgaattactaaatatttttaaacttttcagttttatttttattttattttatttattttttttgagaccgattcttgctctgtcacccaggctggagtgcagtggcatgatcacggcccactgcaacctctgcctcccaggtttgagtgattctcctgcctcctcctctggagtagctgggattacaggtctgcgccatcacacccagctaatttttgtatttttaatagaaatggggtttcaccatgttggccatggtgaatcactcctggcctcaagcgatccacccacctcggcctcccaaagtgctgggattacgggcatgagccaatgtgcctggtccagttttatttttaatatggtaaatattgacagatatagtgcacattttttaagttcttaataatttttaggaatttaaaggggccctaggacgaaaaatttgagaattgttgctttagaatttttttttttaaatgtgctggtggcaaattcttagcttttgcctgcctgtaaatgtttttgtttcatctttattccttaaagatgttttcaaagacataatttatttttctttagcacattgaagatgttattccactatcttctagatttcatcattgctaattaagaagtcagctgtcacctgtttcttctttgagaggaattgttcttttttccctctagctgcctttcagatttttcctctctatctatgatattttatagcttcactttgatgtgcctagatatagatttatttttatttatcttgcctagggtgtgttgggcttcataaatctgtggattggtatctttcgtcagttctgtaaaagtctcaggtactctttgttaacattcgtctctgccccatttttcttctagaattatgatcaaacatgcactaattagaccttttattgtattctctttgcttcttaggctatgctctgaaaatttattttgtcctaatactcagtttatagttctgtcttgtttccaatctgttgttaaatccctcctttcaattttaaatctcagttactgtattttttaatttctagaaggtctgtttggttcttttcaaatccactagatcaagtcactctctgtgacttcctacgacctatatttctagcctttgccttttattatttttttaacattgtaagcaaagttgttttatagttgataattcttgtatctgtggtctttgtctcttcatactagctgttatttcttaacagttttccctgatcccaccttacttcctcatagatttgattatctttgattatgtgctgcttattttttttaaagataattatctgtattaatatgagacctagattttaagatacttcccctcaggattgtgctgtgtgcctgggcacattgcaagtccaaattactttaaagtatcctagaacaccagaggtgaaaattcatgccattctcgtgcatctttaccttatgggtatagcccattgggaatccttagtgtcgggagggagttctattacaccttccacttcgggcagatcctgggctttgacattcgtcctcttcatcataaccaaatatcagacttgcctaatgcgtaaatgcccttggggtaaagcatctgtgttctgcttacctctcagggttcctgcttttccctttagctttggttccatcacttgtgtgttcaaccagtatgggaaactgcctctagaagcagtgttttaaaattttagtctaaccataaaaatagagaatgcttaccctctggatataaatgccatagcgataactttgaactcctacattacatgccttttatgtaaggcaaacctcagtacacattgagagacagtgtcatatacttattaagatcacaggctctaaaatcagactgccttgtttaaatcctggccctgccatgtagtagtaacctgtgttaatttatgcaagatacgtaatctctctgtgccttggtttcttcgtttaaaaagcagaataatagcttgcctcatgtggtcattatgaaaaacaaacaaggccgggcaccgtggcttacgcctgtaatctcagcactttgggaggctgaggtgggcagatgacctgaagtcgggagtttgagaccagcctgcccaacatggagaaaccccgtctctactgaaaaaaaaaatacacacacacacacacacacacacacacacacacacaaattagctgggcgtggtggtgcatgcctgtaatcccagctacttgggaggctaaggcgggagaatcacttgaacccaggaggcggaggttgcagtgagtcaagactgcgccattacactccagcctaggcaacaagagtgaaactccatctcaaaaaaaaaaaacctagataaggcaaggcaagtaaatatttaacacagtggtgcctggcccacaattggctttcaagtgcttaggacagtcagacatatagaaagtgctcaataaatattcatcggttatgatgttaagcatttatgaagtgtctgctgcaccaacaagcctgtgctaaagtctcttgatctttggctgtatccaagttaggaagatgatcacccttgcaggaaacaaatagagaacaattcgacagcagtaatgaagttacttgctgaaataatggtgaagtttttgaagtaacttaatgttttatgaatttatgatcagaatagcaaagagtcagtgccttttggtgaaagtggtttctaaactaggactatgaggaagtggaaccgtgaaggctggcagcaatgaggccagaggctgtcgtgagcaacagccgtgaacatggcacggggccggcagttcccatctggatgcagtttttgaagtgtttctccacattgaggttctcactacaaccctctgaggccactgcatttcttttcactttgttgctgagaaaaacaaggcctaaagaattgtgtggaatagtagaaagagacaagctgggacagtccacaggctggcaattcctggtgaggtgaggatggccatattccatggcccagaaacttcatttctagggatggggcttggagaagtccttgaacagttctatttatgagtcagtgtgtaagtttacaagtgaatgtctcctactttcagtaggatgatggacaaaaacctttggcttactaataccatggaatacaatatagtaattagaataaataatatagatctctatgtgtcagcatggataaatcaggagacataaaactaagtgggaaaagctagttgcagaggacaactggagtgtgacattgtgtgtataaaagttaaaagacagcaaacagtaatgcagtatgtattgtttatggacacctacaaaggcaggaaaggtacagagaaaaaaacaaagtaccaagaacaataaacaaaaacatacctgtcttagggcagtggttgctctggggcagggaaggaagttcatctgaaacaaatatggcaaaggctaacatattttatctctgattattacctaactgtctgttatattgttttctctgtgtgtgaaattatatatatatatatatatatatatatatatatatatatatatatataccttttttttttaataaagaagcttaaaaacaagctttggaatcaagtagactttggttcaaaagctgccacccgtttactcaaattcctttctcttgctgatcttcagtttcctcatctacaaaatggggtaatcattacttctttgatgttctcataaggactggatgagatgatgtttgtaaagtgcctagtataacctctaacttcttataggtcctcaataaatagtgctttttataataaattgagtaatccaaggccacaggtctagtctctggcggctgtagaatttgaactcagatgtcctggccccaagtccagagctgcttccactggcgagagttgtgtgaagaggatgctgttagtggaggagcagggtcacagtaccacagctctagcgacctgcggcagcatcaccaggacagaagctgccgctgcattacctcctccttacctctgcagcccgtctgggaacaatcttttttttttttttttttttttgagacgaagtctcactctgtagcccaagctagagtgcagtggcgagatctcggctcactgtaacctctgcctcctgggttcaagcgattctcctgcctcagcctcctgagtagctggaattacaggtgcacgccactgcacccggctaattttttgtattttttagtagagacggtgtttcaccatgttggccaggctggtcttgaactctcgacctcaggtaatccacccacctcggcctcccagagtgctaggattacaggggtgagccaccttgcccagcctgaacggtcaatctttaaaacctggcaatcaaagccaaacccagaagtgagaaagtcttcacagttttattgacaatggcattgagagtattaagaagaaacattggaattaagaagagagaaatagaaactttttctttttaagctgctctgtccagcagcttaggccaggttaggtttatggtaattaacaacccaaaaatctcaagggcttccaacagcaaatgtgtctttcttgcccatctccagtgtggagcacaggctgctccaggtcctctccagctggagccacagtggaaggagcagcccctgtcaggcccccccgaggactcagcagaggtgggggtggggagcgccacctctgaagccgtcagagcttctgccccagcacaggaacaggcaattgaagtcatatttctg

SEQ ID NO: 391 - DNA, 1866 bp, Homo Sapiens
atggtaaaactacaaaggaaacagattgaagatcaagatagtagttccctgggggctggggtaggagtggagaaagcaggggtggatgggaaaggagccacaggattgggagggccctgctcatgctcttctgaagcaggcgatggcctcgcagaagaagaagaagagcaggtgcccactgatggaggcacatcagcagaagccatgcaggttcccttggaagaagatgatgaattggaggaggaagaaattattaatgatgagaatttcctgggcaagagaccactggatagtcctgaagctgaagaactgccagccatgaagcggcctcggctattaagcactaaaggggacacgctagatgttgtgttattggaagctcgagagccactcagctcaataaatactcaaaagatcccaccaatgctttctccagtccatgtacaggacagtacagacttggcacctccctcacccgagccgccaatgttggctccagttgcaaaatcacaaatgccaactgcaaaaccattagaaacaaagtcatttacacctaaaacaaagactaaaactagctctccaggacagaagactaaatcacctaaaaccgcccagtcaccagcaatggtcggaagtcctattcgatcaccaaaaactgtatccaaagaaaagaaatcacctggacgttccaagagccccaagagtcccaagagccccaaggtcacgactcacattccccaaacacctgtgagacctgaaacgcccaacaggactccttcagctacactcagtgaaaaaatcagtaaagagactatccaggtaaaacaaatacagacaccccctgatgctgggaaactgaacagtgagaatcagccgaaaaaggctgtggtagcagataaaacgattgaggcctctatcgatgctgtgattgcacgagcctgtgctgagcgagagccagatcctttcgaattttcttctggatcggaatctgaaggagacatttttactagccctaagagaatttcaggcccggagtgtactactcccaaagcttccacttccgcgaacaatttcacaaagtcaggatccactcctctgcctctttccggtggaacctcaagttccgataactcatggacaatggatgcctccattgatgaggttgtacgtaaagcaaaactgggaacaccttcaaatatgccccccaactttccttatatctcttctccgtcagtgtctcctcccactcccgaacctctccacaaggtgtatgaggagaaaaccaagctgccttcctccgtggagataaaagtggaaccagtcgctctggccccgagtccagttatccccagattaactctccgagtcggtgctggccaagacaagatactcttggtggcaagtaacagaaatccaaatcaaaccgtcttagaggggaaaacagcaggggtggatgtgacttcggcggggccacctgcaggcttgccaagtatcctagggctctgcccaccctcctcttctcatctggcctctgcggtggcagaggtggtcctggccactcaggctgttgtgattcttggtgctcacagtccctggcgaagccccgcttcccgggcctccgttatcagcccccgtgaaggacttcgcttcagcagcccctgtggtagggaggctgccctgtcagaaggggaagtgtgtggagcacaggctgctccaggtcctctccagctggagccacagtggaaggagcagcccctgtcaggcccccccgaggactcagcagaggtgggggtggggagcgccacctctgaagccgtcagagcttctgccccagcacaggaacaggcaattgaagtcatatttctg

SEQ ID NO: 392 - protein, 622 aa, Homo Sapiens
MVKLQRKQIEDQDSSSLGAGVGVEKAGVDGKGATGLGGPCSCSSEAGDGLAEEEEEQVPTDGGTSAEAMQVPLEEDDELEEEEIINDENFLGKRPLDSPEAEELPAMKRPRLLSTKGDTLDVVLLEAREPLSSINTQKIPPMLSPVHVQDSTDLAPPSPEPPMLAPVAKSQMPTAKPLETKSFTPKTKTKTSSPGQKTKSPKTAQSPAMVGSPIRSPKTVSKEKKSPGRSKSPKSPKSPKVTTHIPQTPVRPETPNRTPSATLSEKISKETIQVKQIQTPPDAGKLNSENQPKKAVVADKTIEASIDAVIARACAEREPDPFEFSSGSESEGDIFTSPKRISGPECTTPKASTSANNFTKSGSTPLPLSGGTSSSDNSWTMDASIDEVVRKAKLGTPSNMPPNFPYISSPSVSPPTPEPLHKVYEEKTKLPSSVEIKVEPVALAPSPVIPRLTLRVGAGQDKILLVASNRNPNQTVLEGKTAGVDVTSAGPPAGLPSILGLCPPSSSHLASAVAEVVLATQAVVILGAHSPWRSPASRASVISPREGLRFSSPCGREAALSEGEVCGAQAAPGPLQLEPQWKEQPLSGPPEDSAEVGVGSATSEAVRASAPAQEQAIEVIFL

SEQ ID NO: 393 - DNA, 71801 bp, Mus Musculus
  misc_feature (1)...(71801): n = A,T,C or G
aggcggtctgtgccggcagtgtgctgccctcacccatctcgacctcccgttcgcgtccgaccgctgccgtcccgctgcccttttctcgagcctccccttccctatgttccgggaccggagtccgagaagcaaagacccacttcttgtccagttcccatcatgtccgaagtgaccaaagagctgctggagctggtgtggggcaccaagagcagtcccggactgtcggacaccatcttctgccgctggacgcaaggtaccaaggcagggctccgttccagccgctcagcttgggctccgggagtcgggccaggacgcctctttcggtcccattacccccgctccaccatctcgccccgaccccatcacctcgggtacctggcgcttggccccaatgcccattcttcaccagtacccgtgcttggtcccagtaaccacgctttaggcactcggggcacccgcgttctgtcccagtagctccagcccctccggtcccctcactccttccctgtgctcgcgcttagtatcccggcttcagtccctctagtatccgcactctttccccgtaccagcccttggtcccagtaccccagctgcggctgctcggcttcccgcactcgctttctttccctgtaccggcgcttggtactagtacaactctaatcttccggtactcgcactctttcctacagagtttgatcccagtacccctgctctgaccactttcgggactctgcgctcagttctagatcccggacttgattccaataacccggctcagacacctcgggtactctgtgttaggttctattgccattgctctggcctgttggatacccagagctagtacccctgctccaattagtggttctcagccatcctaatgttgtgacccttttatgcagctcctcatgttgtggtaacccctaattataaaagtattttgtataaaagtacttcataactgtaattttgctacggttacgtagtaatataaatatctaatatgcgactcccagggggtcgcgacccacaggttgagaaccattgctctaaatggcttttgatgaggaagagtttgagtgagagagtgtttaccaaagaacgcaagtgcctctgccactctgggctaacctgctgcaggagtgaaaggggaggggccctgggactgcaatgtgtgatacaaagagggtgccactgttaagatcattacatctccagccttcgagtgagctttaagttatcgtcagtgtttggaatgttttttggatgggtggtgggagggtggagatctaggtgagtaatacgggaaagcagtttcatgttgtaattaatgtggttaggtgtggtgctctgaatggaaacacagtgttgcttgctgctagattgttcccttgtcttcaagtatccctgattttgtgatggcatctgatattgttggttacattctttaaaggaatatggatcacagcccttcctctgctagtctaatgatgctcagagctactcttagagggcagtgataaatgttgctgtcgatagtcttttgggattatgggagtagtcatagggcacggacttcctgcattagtaaagtggcttgatttttgtggtcgataactgcattgaattgacagctgtaacctcagtcttcggaaaataagatgcaggtataaaatggtttgtagagcaaaggtacactcagagagtttgcatttgtgaagttacatttgtaaagctactatgttgctttgctttgcttgttaaaataagccaacccaataacacatagttgttagtttttcattgatggacggtttcagttaactctttggaaattcacttcagctaaagaagtatgcattttgggttatttctgagcaattcttatttaagtatttgctttaattttttacttaaaatcatatgtatatgaatgttttgcttctttgtatacatgtgcaccacgtgcataccttgtgcctacagaggccaaaagagggcactggagtccctggaactgaagttatgtatggttgtgagcctgcatatggatgttgggaatagaaccagggtccaattcacaagcagtcagtgcttttagccactgtgccatctctccagatctccaattttgtttaaaatcaataatccctttaataaaaggcttgaattgaagttatttttgctttttaataaggtcttaccatgtagctttgtctggccttgaactcacagagatctacctgctttgacctcctgggtgctgggataaaagacagtgccatgtcttgcagctccaaactgacgctttttagtttgacaatttggttttttgtttccgttttcccctggtttgcctaccttgtgaaaatgagttttcactttttcagttcattggcagcacttgctcttttcctgtaaaacacactggtgtcctgagtcctggccgccaaagcctgggctggcagagcagacgtcaagcacctgcaatggttattaggtgaagggacagagagtcctggaaacacttgagtccctggagggagccatgtaggtatctgaagaaagtgttccatacgcagggcctcaccccctgtacaaatcttggtgtctaatgttccttggacttttggttcagtgtggctggggggaggggcgcagtgggaagggggcaggaaataaacattctaaaagtaatatggtcattcatataagccattaaaagggcattgacccacattctgaatgaaataagaatttcactgaaaggtttggagcaaaagagacagaggttctggattcaggttggtttggttgctgtggtcgagagttgcagaggtgagatggtaattaatcagatggtccctgctgtagcccccgagggaaggtggagcagatctggatgttagcattggagatagtagaaagtggtcatgttgaccatgtcccagcagaacccaaactggtgtcttctgtctgacagaagtagtattgctcatacattggacgtactaagagttcagttttcagtgctgactgtgtaacttggtgttcggtagactccctgtcagggactttgctctttctaggttttcctctggtgacgcacaaaagctgccctgcttcttaacacatcgtttaagaagcctttgaggcctgtgctttcctggccttaacttagctcttcgcagagctcagaaagcacactgtcccttcctccaaacttcttgttttattgtttcacctgaagctgtggtgggaaagaggtactggctataacagcttaacgtgggaatattggtttgttttgttttgttttttgttttgtgatgaggcaggccatcttgattaaaattagattgggggaggggttcaggaataagagacagtctttattacataatatgaaaaataaaatttttatgttagtgaaaagttgagggatcattaaaaaatataaaatggccagcaagataggtcggtaaggaaaggtacttgttgccaagcctgaccctgagtttaaccctcagtacttctaggcttgaaagagaaagataacttctgcaagctgtcctctcacagcggtacaccacacacacacatatacacttttcattactagatcatttgggtcaaagtttgagcttaggttttcctttcatttagcataactaaattgtaattcacctaacaagcgatttttttaaaagccacaatgttcctaccacaggagaggattaattatttggtactttaaatatgtagtatagtctcgttaattcaaagattttaaatgtctgccatatgatgttatgctgtccagggttcacaatcttcaaagacaacagagggtaaatgtgtctagtctaacactattagctaaggaaaatggggccccattcagatacttgacttaacccagaccatgtggcttatagtagtcgaaccaagtctgtgctgttggttttacaccggctactaagactttagagcccttagttgccctgttggttggaaggatgtgtgggtacagtggaggcttgagagtaaagagtgaaaatttgcaaaaaggttcatgggccacatttaaattaggtgttataaaatgtgatactgaggacagagtcactgtcttcattgtgtcacaatatgttacagatgttacaaaactctctgtcaaatcagttattagatgagtaattttagatttaatcagaaattgttgtttttgtaataaacaaatttcttttaaatctaggaaataatgtgagtgaaaaaacatttgacaagaaaagtagccttacattaacaaactcatgttcaagggcacaaataaaacaactctctatcgtgtgattgtaactgtaagcaaccttccatggatcctgatagatgcattataatagactttttactaatgtttttacttcttctttgaatattggtggactccttagggaaggctaacttggtgtttattacatggactgaaagtctgtagactctcaatcctcctccgcactaacacgcagtaccgggactcctctcttaatcttcttggacaaacagtgaagtctcttggctgtaactctgctacccaagtgctggaaaggcccagcccagcttagcggaagagaaggtgtgggacaggtggattcggatggtgtggcccagattcttggctttgcttctcagtcctaggtcggacctgacatttgattgtcttaatgtgataaccagcacttttagttgtcactttccatgttttcctatccgtcttatccatttcctgttctcaggagctccagggtgttgtggataaacctgtcttgcatcagcagacagtagttacaccttagctgagtgtccccgcttccactcatcatccctgtgatcgtggtccatctccgctcctggcagcctctcttctctgccccttttctccttccttcccagtctctcctgagatcctcagttcccacctctctttctacctcccaatcacaggctctaggctttttagccaactgattttaattagggagctaggttcatacaacaaaggcatagggatttgctcaacttggggcaaccagatcttgcggtacagaatttatcatttgatgcataacagcaccagaacaatccccaacaagctgtccttctacatctcagaatcagcatccagacaggacctgagttcttcccttcttcattcccctgactccagccagtagctttgcttctctttgttttagaaattttctaagatttatatctgtgcagtcaccagctttcaagttttctgagctcaggatcccatcacacccttcaaaattaaggaacttaacatgaaggtcttgatagtgttgtgaaaacaactttaactttaactttaactttaggtgggtcccttgcactatctcaagtactgtaagtctgtagaggttggggggggggcacagctgacaacctctatgtggttgggagtcacccctgctgtgctgcactgtctcagaccttgtaagacaaggtctccaatttccttttcccgtatcagtcgctgcatcagcccccacttatctctttctatttgtctgtctgtctgtctatcatctattcattcactttgttttgtttttttgtttgttttgagataggggtgccactatgtagccctagctgcctggaactcactacatagacccaggttaggctcaaactctgatttcacctggctctgcctccccagtgctgggattaaaagcatatgcctctctctctctctctctctctctctctctctctcacacacacacacacacacacacacacacacacacacacatatccttaatgacatccttagtcattaagcatcaaaataattctccatcctgccatcctcttttcttctctgaaacttgttcaagaattagcttgcttctgctgtttctcctgtcatttaaagtctggctgttccctagctctgagtttcttttgcagtactggtggcacgcttgatccagcacttatgtcttagcacatgccgcagctgactactcttgtacctaattgatcttttctagaacctctgctgctatgtccctgtcttacctgtgtctctaagctgataccctgccttgctgaccttgcctctgctcactttttaatgttcttagcttcatcatctttgcagtgcatgctggcactcactgggctgactgttccagataattgcatttctatctgtagtcccaaagcttgtcctgaggtccagtatccccgcttctacgtggtagtgacggctcctttacatatttgaaactgatgtattttacttcgtggaaaccaacacccccaattgtcttccctctcagaacttgaacagacattaacatgcagtgggtatacagcatatggtggaaacagccacggatacctgtgtaataaactaacataaatatagattaggataaatgctggtcctgtgaggcatgggagagtacttatggtcttccaggaagtctctctaaggagctcacatctcacttgaatcctgaagactatgaagaccagagtggaagcatttcatcgagagagaagagcagcattactatggacttcttagccgatcaaagtaaaggtaaaatggaggtccattgaattggcgacctcaccatgtcttcagatcagaaaagggagttaaggttctatttcgcttgcactgagaggctatagaactattttcagcaggttgtgaccaagtctgttttccatttctgcagtactctccaggcagtacagatgactaaggggtaagaagatgagcagctgggcagtgtggctggaagcctttatcagtcctgcaggggacagggcaagctgtctgaactataagttgatgagatacaggacacatttgagatatgttttggagccctgagccaaaaggaaggaagaagcctaaaagatgagtcagagtttcttcagaaagggcaagcatgtgtttcaggcagaaggagcattatgtacaaaggcgtggtggaacatacctgtgatcccagcacttgagaggtggagacaggaatgtctgaagacctggaagaatctcaccagtgggactgaagtcactgtgcagggccacaagagaacttcagattcggtgtctggtctgtatttggggatttcttggttacagtcagtaatggaaattgtgggagtagacaaaattattaggggtaagtaaaattctgcatactaccagaaagaacatacagagaggaaaaagcctaatcccaaggccaaggcctgggaaatgtggtgtttaagaggaactgcagtgacatggaggataaactggctaacatgcaacaaaagaccagaatgcaggaggccagtgagcatggagagagtgagctgctgcagccagggattgatagtgaactcatactgcagagactgcactgagaaagctgggctgtagcatagagatggctgggannnnnnnnnnnnnnnnnnnnnnnnnnnnnnnnnnnnnnnnnnnnnnnnnnnnnnnnnnnnnnnnnnnnnnnnnnnnnnnnnnnnnnnnnnnnnnnnnnnnnnnnnnnnnnnnnnnnnnnnnnnnnnnnnnnnnnnnnnnnnnnnnnnnnnnnnnnnnnnnnnnnnnnnnnnnnnnnnnnnnnnnnnnnnnnnnnnnnnnnnnnnnnnnnnnnnnnnnnnnnnnnnnnnnnnnnnnnnnnnnnnnnnnnnnnnnnnnnnnnnnnnnnnnnnnnnnnnnnnnnnnnnnnnnnnnnnnnnnnnnnnnnnnnnnnnnnnnnnnnnnnnnnnnnnnnnnnnnnnnnnnnnnnnnnnnnnnnnnnnnnnnnnnnnnnnnnnnnnnnnnnnnnnnnnnnnnnnnnnnnnnnnnnnnnnnnnnnnnnnnnnnnnnnnnnnnnnnnnnnnnnnnnnnnnnnnnnnnnnnnnnnnnnnnnnnnnnnnnnnnnnnnnnnnnnnnnnnnnnnnnnnnnnnnnnnnnnnnnnnnnnnnnnnnnnnnnnnnnnnnnnnnnnnnnnnnnnnnnnnnnnnnnnnnnnnnnnnnnnnnnnnnnnnnnnnnnnnnnnnnnnnnnnnnnnnnnnnnnnnnnnnnnnnnnnnnnnnnnnnnnnnnnnnnnnnnnnnnnnnnnnnnnnnnnnnnnnnnnnnnnnnnnnnnnnnnnnnnnnnnnnnnnnnnnnnnnnnnnnnnnnnnnnnnnnnnnnnnnnnnnnnnnnntggattttcctgccttctgtcccaaggccatctgcatccctgtagctgctatcagttaatgctgattaggagtatttaaactaagacagagccagcctgtgaacacttactatctatcatgccatttagttcttaagttacagaatgtgactcaagtattggaatgaagtagataactaggcaagtattctagctaccacctagcccactgctcccttacagtgagtgctctcagtaattatccttaatggggggatggaggaggacgaagtgaacagcaacaaaaacactggtgtttatatttccagtcttccttcaagcatatgaaagtagggaaaagtgagatttaagatgttgtaggggtggcttagggctgactctgtgcttggcatgcatgagctaattttattcattagaccaagaattaaataaaagtcagacttattgtcctttccattaaagtccactttacctttcctgggtgtgaaattgtgtgtgtgaaattgtgtgtgtgtgtgtgtgtgtgtgtgtgagggagagagagagagagagagagagagagagagagagagagagagagggagggagggagggagggannnnnnnnnnnnnnnnnnnnagagggacagagacagatagagagtcctcttggttttttgaaagaccaagcattctctccaataactgtagatattttctgttgtgaaacatgagctcaaagcaaagtataggaacaattctttatagctgctcccggaactctttttaatccttgttattgcttttatttttagggtttgtgtttagtgaatcagagggatctgcattagagcagtttgaaggtggcccctgtgctgttattgcacctgtccaggtaacatagactactttaccaactccttagacaagggacatgttccaaactttgggcttgcctctgttttctgatgtctgtactctacagaacaaccagagatggccttctaacaactcgtacacctagagttctaactatcaagataaagataagttctttattttggagcatgagtgagtccttacaatagtagcattttcaagggaaagtaagaggtgtaccctgagttttagaagatttggagttagagataagatctgttgtgtaatataatgagccttttgatactataaaatctatacatttaaagggtatagtcataacaattaggcctttatcatttattccatctacaaagatgtctctagaaagttacagatgagtgcatgctttcatggcctaagttttatatattattttgagctaaagattggcctttctaagtaagttgcaaccaattacaaacacaatttaaagaatttttttttctttgtacaaaagagttttgttttcaggatggccttgttttgactctgaatgtttttgaatttaagaactgactagtaccataaactgttaagttgctagaactaacagcttctgggttactcttagaagtgtgactatgagtgtcacctcaaagctgttcatactttaaaatgtttatttaattagaaatgatgcaaattatccactggggatgaaggatacatttctaaactcttggttatgtaagacattagttcccaacattatctttcatatgctaacatcactcagttaaaaggaagaggttcttttgccttctcaggaatggagagatgctcagtgctttagaacacttgttgctcttgccaaggacccagacacacatgatgtacatacaaaaatgcaggccaacatccatacacataaaataaatctaagaaattaaaaaagaaaagcagtctgagttattccaaaatacacctctatagatcatcttgtttttatttcttcaaagaataaaactaattgttttcatattgataaaattattattgcttcaaagtcgctaagtgtataaagtagaaatttaaatataataattatagaatatttaaatattttgtgtgattacatatatttttatgaaaatatagtactactaattattattatatctattttcctgaatctactgaggcagctttcatgtaccaataggaatctcgtctgaatctgaagacccttgctctatcgtgtgtattacattcagaaatagtctctgtggtcagtaatagtgctaaagaattggaggtctgcgaatatacttaaacacaaggtagatcacaggcatttaaaaaccagtgtgtatcaaaaataaacaagggataactttaacattaaaattttgactgcatgttacagacctttaacacagtgggtttgctttgagaacatgccaatattttcaatcaataaacttactttatacacacacacacgtatatttgtgtgtgtgtataaatatatatatataatatatatgtgtgtgtttctgcttaagcatcaaaattaaatcattaaagtaatgagagaatttagtaagttaaaatattaacagtaacatttcaaactattaagtttagactatgacacttctagaatatgtacataggaatagcattaaacagataattcatttattaaataagaatttaccaagatttattaatactgtgataaaggaactctaatcagtggtgaaataaattgaaattttataaatactaccaatatgagaggcagattgagaggcaaatgattttcggtcatcttctatcatgtgccaaatatatccttaggaaaccaaaacattaatgtaccagtgctctaagaaaaagaactactttaagctcagaaaaaaatttcaataaatattattattaagtgatattgcctatgtttagcagtgaattagtacaaattggataagatacaattcatccccacaggtcaaatgggcatcaccaagtggttttttaacaggtacactgatgctagacaagaaaagaataaagacatttgctgagtgcatgccagtaaaaatcaagcaacagcttgattctttttcctttttattttttttttaactctctagataaaaaattgtcaacacttatgttggtagagtagtactgacactctggaatattgttgtctagttcagatttaactaagattctgtgaagttgttgtagaatatggtcagagttatatagattcttaatgaataatgtacttctgagaaaccctctttaaaaataacccttcatatagaaaaagttttcttcatgaagaaattcatttatagtagcaaaagctacaaccaactcaatgtattttaacaaagtttaaatgtggacataacaggtaaatcttggaacttcatagaagtattgattatggctgttatttctgggaaaactaaaaaacatactgcttactgtatgcattataattccttcttctaaaagcagttatgaagagatgatgaaggtaatgttatatgccgacagcagtagagttagtggtaggataaacacccctgttttaccttcaaagtttgttctgtaagtagttacacagaatagttcatttatgttgattgctgatcatagcatagacttaagtatagtgtttgtttcatgtctatttaagtacagtaggactttattgttggggtggtcacattctttgaattggtggcctgttgggtgccaggcagtatgctgagtgcctggcatacattttctcatataatccttacggaaatctttcagagtttgtcctagcacttttgattgactaggaaatcaagactcaagcttaggtccttctgactaaaagcaatctccatgctgctttctaatagcatgtaaagagttttataatacccccatttcttagacttgtcctacagagattcatagtcaatattggagcccaggaatccacatttaaacaagtcaactgactgtgccttaaggaggcactgtcctgtatcctgcagctttctacgacgtagccagtagaagactagagatcagttcctttttctttgaaaccatataatttgatgactcatttcatgaagttatgagttcttgtgagaatgtgattactctaatagtgagattcttannnnnnnnnnnnnnnnnnnnnnnnnnnnnnnnnnnnnnnnnnnnnnnnnnnnnnnnnnnnnnnnnnnnnnnnnnnnnnnnnnnnnnnnnnnnnnnnnnnnnnnnnnnnnnnnnnnnnnnnnnnnnnnnnnnnnnnnnnnnnnnnnnnnnnnnnnnnnnnnnnnnnnnnnnnnnnnnnnnnnnnnnnnnnnnnnnnnnnnnnnnnnnnnnnnnnnnnnnnnnnnnnntaccatagtactgggcatctagcacataatctcaccatggtaggcaagtgttgtagtaccgagtttcatccacagtgcttttgtcttttagcttaatacagggccctgctaaatttctgcagatgaccagtagtggtattctctgtataacagatcagagctataggaaagaatggaccattgttgtatttagatacctcctatcctagaaatccaagagaaatgtagaggtatttctgtaaaccttcactatgtgaacagattgctaggtttctataaattccaattacctatctgctatgggaattgattctctacttactagaatgtatgtatctgagatgggtaatctgtaaatctggggcaaagttgatagtagtatgttctaagtaaatatctttataccctgtcttttgactgtggggaaagactttgaataaaactactcaggagatcaggaagatggcattgagtgttcctcgtttttaaagaaagagctgcgcgagctgtgactaccatgcattctaactgtcgctttaattgtgtaaaggcgtttcttttgaagaagcttctgttctcctccgagaagtcgtcctggcgggattgctcaggtatgctagctgccttcaaactctctcctccctccggcttctcttttacacctcatctaagtcacacttattgctagtaattcattttcttaaaagtctgtcttcactggggaacaattgatggaatattatttctcagatgtttcaaaaagtttaataaaacagactttgttttaaaatgttctttttcagatttttcttaataagggacagaagacagagtattatagtaataaggcctcttgcttaaatggctgtttctcttaacctttagatgattatatatccataattaaaacctctttgctctggtgtttgtgtgacaggaactcactatataacaaggctagcctggcacgcactgtgtaggccaggctagccccagccttgcgatccttctagtttaactacttgttgctaggattaccttctgcaccaccatgcctgtgtgttgctggtggcttcctaccccatccctcctgttttctttttttgccttattgagttgtgatgaagagctcagcattcttgttttactcttttatcttttattataatgcattattaaatgggaacactgaaagtttgcagaataaactatcagagtttctgcagcttgagtaatactgatacgggatgccacctgatgacaaacatttgcattccacttggcagtttacaaagaccttcctcagttgcagaattccttgtgagcctcacagtcacttctagaagaaggcaggagattacagtgccagctttgtgtgtaagaacataatagctttccttctaacccatgaccatagaatctcctcaagattctgaactgaggagttaacggaattctggtcatatatttagtatgaatatctaattcacgagttcagtaaagaaactttgagagtctattatcaccatgacttttaattgctgaaaacatttcttcctcaaaaatacagtctctttgacaaatttgaaaaacattctcataaggtcatgaaggctgtgatgtcaagtgactggaaccattgctgactgtaacatgtgatgtaggatgtgttacactagtttcatttggaagtgtgagtgtgatagtgcactggaaagcgggcactgcttgaaagagggcggagggctgcccaggttctggaggaaatggccttgtttgtgcctttgaaaagagcaccagtgctcggcatactgtggagtggtgtaaggctcctgctttatgcagcatagaggtggttgcttctgctcagtaatggcctgtggtttgtgtgctgatggtgtcttgtcgccttgctgttattcctgtaagctggtcaggcggaattcagcagatgaggagaacaggtcccgggggccctgttgctcctttctttggactctgcagtagagggagctgagtgctgagtgctgaaggtgagatgatgatttctcatgatgttaattaagttctgcacttttcagtcttcttctaactggtgccaggatttaaggtgataacattttaatctttaggcacattgttcttctaaagagtaatttccagtcttctggtcatatgggttttccttattctcagaaaacacttgattttcattattaagccgaggccttcttactgtttctcatgactcgattttcttttccagacaaagcattgtaactcatactttggttatttttagaggaagagcagaaggagctcctttgtcacaccttgtgtgatattgtagagagtgcttatgacagctctggatcatactgcttggtttcatggttgagaggaaggacccccgaggaagcggctaggatttctgggagtcctgcacagtctagttgccaagtggaacattcttgtaagatacgtttttatttcatgaagtaatttcttgttcttttgttttaataaatctattgaaaattttgaagaaaaaatattttatgttttgataacactttctctaagttaatattttctatctcttttccattattttatttagtgtaagacagtgcatttttacaaaaggagttacatctgtctcttaagcattttaaaaataattgtagctaacttctgcttgatgaaatcttttagtattacaactttgattttaaaagtctgtgggaaatacatctgcatgcagtagttcaggtgcacagtgttctttagatgagaggagctttctcaccatcaatgcttaaatatcctcagctctgttttagaacaacagtggagatattttcttaattaaacactgttattttgttcctgatccttttgaacattgttatatatttggactaaagtagttttagtttcgttttacttatgttttaagttctccacatcttgactgcagtttctttattttaaataatacaaataatacctactctcattcataaaaattacacacttgaacattcttaaaagtggcctaaacactgccaaaatgaacgagtaaattaacgacttctggtggtagggaaaatagaaggagttgctctttggtttgctttggaggactaatcttgctagttaggtgactttggggaattattagttcccaagtgtactttattccatatatactggaacatactcactaccttctatatcaaattgattctgtaaaagacagatactaggcattaggaagtaaatattgattgtgtgtgttatgtatcactatccatatagaactgtctactgacagtgttgcctcccctgagctgaaatgtctgtgttcactgtccattttttccccttcctctacaattagaacagcttgtgcttggcaaattttaataacacatttgccagaaataattttaaaaatttaaacagttgtgtagtgtttcttttcagacctttaaaatattgcctttcgaaaagaattcattttggaattgataatgacatttaaagacaaatggaagctattcaaaagaatgataataaagcatcatttagactcatttttaaatgtttgtaaattgtactgtgtggcttgtaagcatgctattaactccttttgagatactacatattgagaaagggacacttaaaccattcaaagtgtttacactcatttagcattttacattcgtgttatatttagcattaccttagcacatgcataccatatgcttactctggagtggtggtgcatttctgtgctaacacgttggcaagctctaggaggaagggcgtcatagcacactgttagctatgtgggcatgatagattgagccctcctccaaaacaaagtgatgtaggattttctagtttacttagtgcctcattttaaaaatacacatgacataaaaccatacttgaaatatgtttttaacttcatatatagttaaaacattttattaactgagaatctaggaatttatcttagatactaacagttgaactgaacttacattgaaatatttattccatataacaatctgttttacctgtctttctttattcccagctgtggtcctcctcttgtctttattccccaccatctctgactgttaagccatacatatatatttgttttgtatttttttttgccagcctcttgaaagtattctctttatgtcagctttacagtgaagcataagcagtttatgaaacagtataacttggatgaggttagatagaattattttatcctcaacatttaaatgtgaaacctttcccctctcattgttactcatgtgtacagcattatctccattggcttttgtggtgtaaatattttttgcttgttagtaatgcacacttgtttgcagtagtgaattcttgggttcaatttcagtttgtttcccacataaaccaaaagataaattaaacaatttggacttctaaagattttagaaagtcatttgaaacattgaaaagttaaaatcaggctttataaagctaatataatgtgatattttaaattgtacagaaaagttttaattctgatttcataatcatgttttaatcactagtgaaaatgtgtgactttctataatttgcttcatgaaattgttcattgcaagaaagtagtcattttgattagccatttttaaagacatcttctggaagccaagaccgagtctacatttcagtgctggttagagcttggtgctcttaggattcctctgtggatctcagctccctcttttacaagtaaagaggatgaggccatgacaactaactaagtgagggaggcctgtgctctcaagagtgcccagcactcagtaaggccttagtaaatgaacagttgctgattgcatgaatgaatgaggaaacaaacttaaatctgtccttgaacctgtggtttcagtgctatgcctagtatatgcatttaattaatgagccctaagcctaagggttttatattgaaaaagattagccctgatagttactgctatctgtaaactagggcattattttaaattcaagacacatgacaatgtgtgacagaaggcagtagtccctcctattttgcatgttctcctagctgtgactgaattgtacagagatgttcgttacttagtaacccttctgtgttctcagtactatatccattttagttataaccatagtaactaagatgatgaactataaattcatgttgttataaagttcagagtaaactgagacttataagggaataagaaatagggaatgttttgattgcttgaaagtatttacagcctgctgtgtgtatcttgtgtcatttatttgccatgtgtagtgctgaaaagtgtcttttatgtatagctgccttggctgtcgaagagcttggctttgagcgatttcatgcattaattcagtaagtaacattgaaacatttaaaatacttaccttgtggacacattgccattttaagtatgttcattctgtggaaagatccctagatatacatagcacttcttaacttagacacgagtttaaaataccttgtttgagcacttaattgatttcaaatttaaaaataatatctacatgatatatgcttctaagtcctaaagtaactatctaagtacatttttaaaaacacgaaatcaaatatgtcttcatcattatcagtggaaacaatcattttatcatgtttttctgttctgaatgaatgtaaatccatttgtagtgagctaaatactagcatcattttcctgccaaaatatgcttcctgtgattttcattaaaagtatccacacttcatcagaacactcaaagtttttattataaagtcaaagggaggctgctatgttgacagaattataggtggcatttaaaatttaacattaatttcttttagaagaaggcccaaatgcatgctgtagttttatccttcagatgtttgttgaagagcttgcatgttttaataatcgtttctggttgttgagcacctctctgaagaggtccagtctgtggtctaaataactgcatagatggaaggactgggggcagctactacacctaggacaactggaggctcccgacggtgctcagactgtctcaggagactgggttatgtatagtaggagctgtcagcagtagtttttgttttccatggctaaattttactttttagaacttgaagatacttagtaaaaatctcttgtttgtatatagtaatgtgcaagaatttgaaactcttttccatttgtgaatggagtaatcgggatattaatacttaattcttcttcccccccccagaaaaagatcattcagaactgtatcagaattaaaagatgctgtcttggaccagtattcaatgtggggaaacaaatttggagtcttgctttttctctattctgtattactgacaaaggtttgtttaagacgatttactttcttagctcagtgctgttttcctgtttgctgttagaacctgtgtggcctatgtttgtacatcagggtaagaatattgtggcttgtaaggactttgttcctgcctctactcattctttaaccacgtccacactctcctcccctctgcccttacttactgactacagaggtgactgataatgttctaatcagaatgttgtcaggtcttcttgattttggtttctttgatcttagcaatatctctggcatttaaccttttagcccctgtagagactctttctgacccctacttttaatggatttctttgttaattgttatgctagtttctcagagagtgtctcatatttaaaaaaaaaaaagaagcattttctttaatcattttgttttcttctttatgtgtcctttcacttgttttctccttctgaaatttagaattccagaagagtcttttcctgggtcctgtgtaattgttcgtatttttcttctatggatagctatttctttcggctcacctctctgcacctaactccacatgcacacctctggtcctgtcttctttgcaaatgtaaatttcaattgcttgtggccttgcactcacacttggaatgtctcctgattataccttgtctgaaatcagcatttttttttttcttatgctttttgagcattgactctgtatgataggtctgtgacatccgttttttaaataaaggttttctatttttcattataaaaatagcatattaataattctattatggtcatgatttggggtgttagtttttagatttattttatttattacatgcaaaagagtttttgaaaaaatagaagctatgactcaagtttgttgacaggactcaagagcaaattctgcgtagtaaggaccatttggtgcatgtagagcctttatagatgagaagagttttacaagcagtaggagaagcaagtctaaaggagaaagggattggggtataacacaggtttggggctcataaatacttcaagcctacggcagtgggtatacctagggacaaccgtgaaaggtgacattcacaccttttatataagaggtctcttgtgaattgtgcaaaaaatacttaaggtttcatatcatcagaattggaacacaatacaatgtttaatatggaaatgacaagatcttattgtgtggttagaagatgcctgaattggaatgagagtttgtgatgaagagatttggtaagtggaaacctagagacaaggatactgaagtagtattgtagtagaagctgaaataaaacaggatggtgaccatagaatggaagagaaaagggaaggtatttagtatcaataccttaataatattatatattatactaatatataatatataataatatataataagaaaaatcagccaaatacttgaatgaggtcaggtggttagggtagcggtagtggtaggggctaaggtattgtaccctcatgaactaactgttcattctcgaccaatgtttatgctccccttatctctgacctttgacctttgacctgtatcccagccatgtgtcagatgttccctgggattcctttgaccctttgctctctaaagtgattcccccttctgcccaccaactgtgcctttttcccacagagcatcttgacattgtcatagcctgctttgttttgttctgtaggatgacaagtcaagatcccctagctctctgttttcccctgtggtacttagacagtcttttaacactttgattgctggttgtctattccactcttagctttggcctcttgtatagcagtcagtggttcaaattaagtgaacactgctgtggatgtcacttccccgctctccctgtgcttctccagcctcccttctgtaagaaaaagcatcaggaggtggtggttaagaaatgagaaactgcctgttctcataactgatactttattttgttactttatatttgagttacctatttggggaagaattatagtcatatgtaaactttccattttcttcttcttataactctcatgtatttaactgtatacctctgtctaaactcaaaagtctatggctttattataaagttttcttttttcatgacctaaactaaatttagttttctcagtaggtatattagattttaatttaatttatcctgaagttaaataaatactaacttttgtattaaatgagttcctcttctctcttgaaaattgttatctctgtcccattaaccaacactagacataatacctctgagtcctttagtgtccttcatagagcccatgagtgagaatggaaaggaatctttgggggctacttcttaccatctcaaatacaagtctgggtcatttgaacagtgttttattaacatatagtccaaactggtcatcttttgtattaaatgaagttaataaaattttggtttctttagggcattgaaaacataaagaattcaattgaagatgcaaatgagcctttgatagaccctgtgtacgggcatggcaggtaatgtctgtagtctgctgtgtcttactaaatctaggcattaggagcaggaggctctctgatgaatgtgttggtagcagacgtctatggtcttgactgaccctgtgccaccatgtattattgcactgttttagtcagtgcgtgctgtgtgtgtgtggccagtgatgacatccaatttcaggttgtttacacatgactcttatgatgacaagtatcttgtttacattagtaatggcaatatatgttaacaaagtgttgtttatatccatttatggcctttaaaaatgtctaaatttacccacattaacttagaaataaatattttcttacctatctgggttagtttcttctagagttgaaacaattcttatctagttttttctttttttgcttatattgcccaaatcaatagaatagaaaaattcatctattctcacacaagtccttccttttgcacgtgtctaccttagctgttaagaatcgtttaccttccatcaaagattgcatatgaaatataattgtaatggtctgcatctgttgcaaagagaagtgtctttggtgaggggtaagaattgcatttaaatgttgttaagggttatgctggtttattaaagtggcttttgtagattcttcctcaagacccatgacttcactagccaggtaggaaggtttccaatgccagttgattctttaggaccaagtcctagaattatgctcatgcaagtaacattatgtaaagtgagcagtttctatttattcaagagtatgtatcgatgtgtgtgtatatatatacatatatgtatatgtatatatgtgtgtgtctatatttaggtgtatatagcaacaagtaaaggaaaagaggcaattaattgaagagcaaggaggtgcatggaaagggttgaagagaggaaaaggaagagggaaagtaatataagtaatataattataaattcaaaagtgattacatataaaactaaatgtaacactaagtgaaatgaatttttattcatttaaatatggcatcttaaagctgttaggcttctgagaccgcagggacacggatgcaggtcagcactgtagctctcactaaggccggacatgggaaagggaagccaagggttccacttattttgatttaacataatttaatgtaaaaagtcatttaaaattgtagaaattacttgaagaactagctttgtgcctattttaactgatatttaattttcattgatagccaaagcttaattaacctcctactgacggggcatgcagtatctaatgtatgggatggtgatagagagtgctcaggaatgcgtaagtatcttctttgctgtgttcttgaatgattaataatttagtgaaatatgaaagatttatctttatttaatggctctacattatgtggatgctaaggtaagtgctttctattgcaagaaccccttacggtttctaagatgccataatactaagtgcaggtttttggaagccatcttgggtttcaaatctatgagctttagtcaggcttgatcctcaaggttttggttttctctggtttgttgctgggactgtggagctaactagagagatggtaatttacctctcagtgggtgtaacatacgggtacttattcagaggcagtactgcatgcagtgctggaagttatgggaaattataaagtccctgaattccttgttcttacaagatccgtgcgtttattatcacgttgaatctactcgttacatgctgggctgatgtgatgatttctgagactgcatccactcacctgaattcagtcagcattaccttgtaatggtgccttgtcgcagacatcaagggatgcacactggccaggacattcgctcgctcagacagctgttgtgcggctatgaggaaagctccttcatttgttactgggcaatctaaactcctttgctcagtcattcaccttttacagaggaagtgcaataagcctcgtactaaaatgtcgatcatgggatgtgaagcttcacagcttgtgttcagaggcaaatttatactctctctctctctctctctctccctctctctctctctctctctctctctctctctctctccatatatatatattgagtttttcaagactgggtttctctgtgtagccctgactgtcctagaactcactttgtagaccagattggccttgcactcagaaatccgcctgcctctgccacccaagtgctgggatcaaaggtgtgcgctaccaccgcccagctcactgaatatattttgtttgaagaaaatgttactaatacttttcattcccaaatgaatgattttcaacttttaatttaaattttcctcaaattttagaaatttgtatagcaaattcacagaaagaatccaatgttaggaaaattttgagttaaaatcacagaattccagaatttaccgagcgcaatacaacctttcactgtgctgtttggaaattaaagtctgacttcctacactagagtgcagtgtaattgacttagtaagagcctggctttgctgactgcatagatacagaagtccccagagtgctctgtcttgttctgctctctgtgtccagcacatcctaagggctctccattctgatgtagatgtaaaagcccatgagaactggccagccaaagtgctagtctcttacgtaatgtggggtatcttagatttcgccctgctcaccttctccctcctcccaaagctgctggtctctgagaaatctgctgtaatcaggagaactagagaagaagctgcagcttaaggccaccgtccacctgggctctaacactgctgcttcctgctgctgctatgcccacaactgttaactcttttattcattactaagttatcttggtccagtgtcctgtgtaccctacagtttctctcaggttatcctattataaaacccatatggcctgcactcctgcctccctaggtgcataggctcttctcattttgagggtcttacctcagttacagaatttgttcatcacttatataagctttggttcctcgtatatgcaaattcattcatttctgattcttgaagtactgccattcaaggcaaagactgtcattttactatggatggtttaaagtacaatttagagattgaaactaaataatggctagaagatagagttttcttcagaaaaagaattgcctgagtgtatttaaagtttctcttcagtcatttggaatgttgacttgaacttaattctgtgtccagatgtttaagcataaaataaaatccgtacataattttcagcgtttgctgtgtatatttctggtttatacaagatagtaggaaatgtggaacataaatgacaagttatacagtagttttcaaacaatgaggcaagttacttctcttgctttaatttcctttttttttttttttgaaagtaatgccttcttcaaatggctattgtaaatactaagagttctgtcatgtctgcaaggactcaaaggaagagctcaattctctgtcaaatgcacatagatgatatgatatgtgctgaaatgagatgcgttgaaataaggaccatagacatgctgaggaagagggaacctttttccgcagtgtttatattggcataaatagacacaggaattttaatgtgaacatagtatgcgcaagagggctttgggggaaacatacacattatgtttagacagggagacagacagatgtaacagtagtgtacattattttgagaccttaaaatcatgaatattcaggccccagctgagaacagttaagggtagaatttttaggtattggaacatggccttaagacttgtgggtgattctgctgtgtgtgcagcccggtttgagaagcagtacatttgtgatgagcactggtaagggaatgcggcagcatgggcttggatggaaacatgcaggctgcccagtgctgtaccactgtaagcactgaacggagaaatagcacagtaggatctagggggaggaaggatgctgtccgtgtgtagccgtactggagaggaatcacaatttgtaagctgtggcacatagcatagacaaggagagaggtacaggacagtgacagacaggcacaggagggaaaagatatggcctatttatttccttcctataagcaatatactttggatatgtgtttttaacaggtatggttaagaaactaagacttggggctggagagatggctcagtggttaagagcactgactgctcttctgaaggtcctgagttcaaatcccagcaaccacatggtggctcagatctcataatgagatctgatgccctcttctggtgcatctgaagacagctacagtgtacttagatataataataaatcttaaaaaaaaataaactaagacttggatgattattaatttgctcaaagtgaagcatcagaaagtaaactaccaggatatctgaccatggtaaagcctctgcttattctgtatagaacatcttctgtggtagagtctacaggaggtagaacttgtaggacttttcgttttagaggtgagggtgaagtgaggataattagcaggattttaaactgcatttagtactgcattaacacacaaagcacgagaaagccctaacaggtgtgtatattttgacaatgtttgatccttccaatatgctgccattgtgtactacatttcagtgctagacagcctagcattgaagacaagggaaaggagacagttttataggagcaacaggacacaggaacatgagcatgaagtagccttggcagtagacgttcctttgaagaaatgatatgcaagggagaaaaagcaacaggtttcattcaactgaggacactcatggaagtttaccgatggtctaagtgagtgtagtaaatgtgcagaagtaaagaggagagatgtgagtccgttgctctaaggagcaaagcgtccatgagtttccatgagaagagggcagtgggaggggcctggagcagatcccacttgtaaggctcttaggtttgggggttgtttgttgccgttgtctgttttgtttcattaacctagcaacgatcactcctctggcggtgaggagaacttggattttaggtgtgacctgggaatgttgagtggagtatggacaaggcatctttccacctttatttattaacgttgcttggtgtttgaaccatcatgtgtatcttttgccttgagcattttaccttggtgagcatgtgggtagtttccagtttgacttctatcagacagacctgtaagaaacactgtgtgaggcaagcctactcaatgttcatgcacgattgacttgctaaagtagatgtgttttaaggaactttttcttagtaataactttattgaaatctcttctatatactatgcatgccactcagttgaaatgtagaataaatcaaaacttaaatagttttctaactttataaagaaatcctggtctcatcagctccccttacttccatccgctccatgccaacaactcatataaatagaattatatggcactggtgtttgtatcaaatttccctcactttgaacagtgttttcctataccagttctttccttatattgatgagcaagtgatattgcagggtatggtgagccatacatctttatcaatcatcaattgctggacatttgaaatagctacctgactgttaggagtaatgctgtcagggacacctacgtgcaaggttttgtgaaagcatgtgtttttaatcctggataatactttaactcagaagatttaccatttttaggaatatctgtttaacaatttatggcaactttgtccctaaaatatcaatatatctttctgactgtagacttgtgttttctctgtatcctggtgatgactgaacactgtccatctttaaaagttagtcagcttttgacaagggattacacattctaattgacatttgttctgcgtcctaatgaacctgagctcaggcctttgctcacgtgtaagcctgcagctgtgctgtcctctgggaactgcctctgctcatcatctgctgttgtaggcggagggctggcttaccacagtgtctgaggctctggaagtcctttagttctttacaattcagggcatctctcccaaccttttctttttttttttttttctctctctctctctttttattaggtatttccctcgtttacacttccaatgctatcccaaaagtcccccatacccacccccccaccccctatcccaaccttttcttaagtaaattttgtttagtgatatcttttcttcccaagggtttcacttctataatattcaatcatttgaacttttttgtcagttaggatttggttgctcttcccccatatcaactccccagataaaactaatactttctagtattttcttcaaatgtctaatattttcttatgtcttgtccattcatcatttttatacatttatttgatgattcattgtaagcaatagttgatggtcattagcttaaagataagtggaaaatatggaaatgtaaactctaaggaatatgatcatttctataactaagtaatatcattttaaattatgatttatcagaactagtaaatcagaaatgctgctgtcctgaaattgtactacttctacaacacattagctagagccagattgttaggtaaagttagtatcctagttaaatccacatttgagataatcggtcattctgtagtgtaagtgtgcatgtatgcttaacttgaacaggattgtatatttcaaacaacatccagaatataaatgtaaatgatatgctggttagtttttattgtcagcttgacacaacctagcctcacctaggaagagacaactttggttaactaaggaacagtccaaatcaggttggcttacatgatagtttaagtgaggatgaccctcaggctcagagattagcttgtttagctaccagctggtgaacggtttgagagggagtagaaggattaggagctgtggccttgttggagttggtgtggccttggaggaaaatttcagtaaaaagtaacaagtttaagaagtctattgtaaaactgactgtaggtaatgactagtctctacttgaaaactaccgagaatagactaagtattgtcgtctctcaaatatgtatatgaggcaaaaagttttcaaatatctacaatgatccatttaaaatatgctactaaattcaggaaatgaggctccatctgtcttggtgatgaagtgcacagatctggtcaagaaccacgctcaagtatctggcttaggtgatatttctttctctctctttctcttttctcctggttttttgaaaaagatgaatatttcaggttatgttgtatagtatatatacaacgtttattttgaattatagataaaattgtatattaccttttggtaaaaaaaaaagttttatttctttgccatcaaactaaatagtagccgggcgtggtggcgcacgcctttaatcccagcacttgggaggcaaggcagaagcaggcagatttctgagttcgaggtcagcctgatctacaaagtgagttccgggacagccaggactacacagagcaaccctgtctcgaaaaaccaaaaccaaaccaaaccaaacaaacaaacaaaaagacaaaaaaaaaacaaataaacaacaaaaaaaatcaaaccagtagtttgaaaattcaattggaaatttggatactcttcatttctctgttatgagataatataggcaatggcaagatagtcataaaattgccaatttcttgtaagcaaaaagtaaagactgagacttttaaagaaaatccaatgtaagtaagttctgtaaatgatatgaaaatattgtttcacaacttggtataaaaattattagatttagttttactgttgtgcttaatctaagatgataataatattaagtttatattctgcttgagggtatgagaataatgcattttgaaatattatcatccagtgctagtcatagtagtattctccatgtggaagaagtagaagatcaggagttcaagggccaccatcttcagctacatagtattctgaggcagctcgtagtaaaagtaatatctaagccagatatgagcatgtgattctccaccagatctgaatacttcatcactaagatagatggaggtctaattttctgtatttagtagcatgatattttaaaccaaccattgtagacacttgactaaccccatggaaatccatggtgtaatatctggctgtaacactaggtggtggtaatgcattttagactgtggaccctggttctcaacataatgtgcttttctttaacaggaagatttgcctctgctcacagtttagaggaaaggaaacaggctgtttgctaaccatagaatatcatttctaccctatctgctatttgctgtactcctaaaccctggtggctgcaacccaaggactcaaatgtttttattttatactattaatcctcctaaagtttatggacaattccaaagaggttttccttgtagatagtagatatacttgtgatagtaatgtttttcatatttgaagttgaattgagaaaagctttttaatctatgtttatggtcctacttacttacttactacttacattagctttaagtgtcagtatacggaaagccttcctgccagcccaggtgagtgccagcctgtgagtgcgtagtgtctgtatcagaacctactgtgctgcgtcagctgcagggttactacttgcttgaccttacgtcagtgagtctagccttctgctggtggcccattagtgttcaccaggctggcccagcctgtgcttctgagctctactgccagctgcttgtctccagttagaagtccccaaagtagctcagtcacagtttgcataaaagtgaagtcatgctcagccttcacacaaatccagaatatctttcttgaagtcttccttccagttaatcactgtttatcgtgtttgccatggttatgggtttaaggaactgaatgtggtgtcacacacctgtggttccaggtacagaggagcctaaggtgaaaggacccttgaagtcaagggtttggagctgtcctgtgcaacactgtaaagccccatgttgaaaaaccaggaatctcaggcagattttcattccttacctgagtatgttaattttcattctttcttatctttgggtttacatttttcttcttgtcttctctggtcttagaattttctacatataccatcagattaaattcagatgttgccattcttccctgacatggaaacatgttctgccacactctactctgtgtgagtgtgtgtatgtacatatgtagagagcttgtatcatttctctttgcccttcgtcagctctttataaggcagagactatgtcttagtcatcactgtttcacagccttaagcacactggctgctttcacttagaatagaaaggagtagcttgaagtatccatgttttgccagacagtggtggtgtacacctttagtcccagcacttgggaagaaagagacaaatggatctctgagtttgaggccagactgttctacagagcaagtttgagaacagctgggactacacagaaaaaccctgtgtttaaaaacaacaaacaaaaatacaaagaaaaaaaaaacaaacaaaaaggaaggaagagagcgagaaaaaggaaggaagaagaaagaaagaagcaaaaattatgttttaagtgctatttagttatggtcaccattatcccataataaatactaatacttatgatttaacaagcaagctctttttttttagaaaataagggtcagtcaagttacctctttttatggaggtgtgtgtgtgtgtgtgtgtgtgtgtatacgtggatatatatattacgtggatatatatatatatatatatatatatatatatccatgtcctatacatatatatatatatagagagagagagagacacatgtgtgtgtgtgtgtgtgtgtgtatgtggatatatatatatatcctatacatatatatatagacatatatagatatctatatatactatacatatatatgtgtgtgtatatatatatatatatacacacatacatacatacatacatacacatatgtgtgtgtatgtatatatgtttgtatatgtgtatgtatgtccacacacatatacatatatatacacacacacatgtgaatatgagtgtgtgtgtgtatttgtgtgtgtgtgtgtgtgtgtgtgtgtgtgtgtgtgtgtgtatgtgtgtgtgtgtctttgggttaccaagtgatttttttcttaactaaaaaattaacattaaatacttttataaatagttttaatctacatttgaaccattacatttacccagtacaaagctacctggtatcattttataataaatagtgataacatgattatttgatttaacttttttattgttttatttactacatcccaaccacagtttcctctccttccctaccccttcaatctctccccttcaactcccctttccatcagatccacgtccccatccactttccctcagaaaagagcaggactcccagggacatcaaccaaacacagcataacaaggaccaggaacatactatcattgatttgacatcttagtaaatacgtgcagaggtttaaagatagttttaggtgaaagaaacattttgccatggtttgaatataaatatatttatgcacatatatatatgcacacacatgactcagacttacatatactaatgcagtgttgaatttggttttgtttattttattttattttttttttttttgcagaacttctcggtatccatgaacaagcagctgtaggattcttaacactaatggaagctttacgatattgtaaggtaaactgtcttgaggggtttgaatatgcccacactgtggacagtattttcactctgatggtcattaacttcagctcctggctgtcaccactcatcactgtcttacttccttgctgagctcccaacccaaactaagtgttaagaaatgaaggcggctagttgtacttgctttcctgtgaagggagtgagtgacagagcaaagaacaaaatactatataaagtagaaatatacatggttcactataaatatgctattaagctgtttcgccttgaaccttcattgttgtaattgaggtgcctacctgtgcagtcctcaatggctattaaatattgcaatattttacatgaagctcacatcagttttctcacttaaaagatgccatattcttagacaaaggatgatgtagatttgtagatttttttttccattttagaatgtttatatcatatagtggttctgatgacagtgacaatttttagtaacattaacaagtgtcttggctgggtggtggttgtacacagctttcatcccagcaaaagcaggtggatctctgagttcaaagccagcctggtccacagagcaagtcccagggcagccagagctgcccagagaaaccctgtcttgaaacctccctcccacggccctccctccttgcctcaaacaaaacaaaacaaaacacccccccaaaacaaaacaaacaccaatctaaagaagcattttctcctttgtgtgtgtggggagaggcacatgtgcatgcacacacattactgtttctgttattgtctgtcagacatcattccttcctcatgacatcttctgccataaacagagatgtaagagcagtacaggatctcttctgaccttgtaagtagtgactatgcacaacagtaatacctcccttttcagagatttttaattctataaattaatgctattctaagacagcctggcaatcagagacttaaactgagattcctctttctagtacatacacatgctcatctatcctggagaagagtatgcacctatgcgcgcgtgctggctctctctctctctctctctctctctctctctctctctctctctcacacacacacacacacacacacacacacacacacacacacactttacttgtcaccaagttacagatttttaaaggatttttccatttacttttttttgttgctctgataaaataacctgaccaaagaaactagagaaggaagaatttattttgacttatagctccagagggttagagtccatcatgtcagggactacactctatggtgggaagaataggaagcagagagagaacaggaagtgggccaaaggttataacctctaaatctcgcttccagtgatgtacatccttcagcaatgttctacctcctaagatttgataaactcccagacagcacccctgactgggggccaggtgctcagatatgtgtactcagggggctggttctcttttaaaccccatagccatgttgtgtaaatcttcaactggatcctatcttctcagtcagtgttgttccctccattgccccgttccagccacattgggggtctgccatttcccagtctcccatctcgttacataaatggttgacttgtcccttgggttgattttaagttgtgtcagaagaagtatttcctgacatttcctcagttactctccagatttggttgtgagcctagcctttgagggctgagccatctctgcagcctgccccagctcctctttcacattatttgtgaggaatgactcctctatggtgactctttttttttaaatctcttccccaatggtattagacttttacaggattattctaatgctctgatgcaaggttgcttataaatgagagataaagagagctgacaatcaaaccaccaatggctttcacttgggaactgggtaccagcaaattggagctgcaggcacagattctacatggcaagaggggtggaactagcttggttccctaggctgtcatgatgtgctgatttgaataattccagtgggctctgtgccataagactgtaaccatgtctggtacctgacatatgggcaaatagactgatctggagtatgaggagcatgaagagaatgaattggtatcagttttatcagctatccttaaaggagactgactagtttataacctggacatcaaacccaatagtcggtgtctaaaatgctataggtaacctcagcagtatgcaagttctcagccaacacgtatttacttacgtttcaccagataattaggggaatggcacaaagggaatgaattatgtttgaataaatgttataaatctaaacatttctccattctctgagagtggaacagattgctttctaataatgacactatcatttaatttattttcagcatatatatttaggtacataaatgaagcaatacctatttataacctttctacacacacatgcacacaccaataaagaatgatgcttttagcggtgtgtttaaaaataagaaagcataacttatatctcataaagatcaccattttggatgtatatggttctgtggatgttgctatatttgtaaagctgtgcaaccatcgtccttacctagttctggaaggttttcctcacatacacacaccccactcccccaagagtaggtctaaccgggcagccactccttcttcctcacaccagaaatcacagttcaactttctggctctgtgggttccttcacctgtgtattagtaatttctttctttctatgttgagaccactcttgttttatagtgtatcaatctgtttccacccattaactcatagatgtttcaaactatacattaaaaaaaaaacaaaatcctgttcctattgtaaaactttaaatgtaatttgtcctgaagaatagagtagctagagtcttctctattcattctctctctctctctctctctctctctctctctctgcctttataaggaggctttatcattaattatttaccttagtagtctcaggaagaagaacagattagcctagtctaacatgatttgcagaagcaattgttctgattgctaagaacttaatttgggtgtttttaatacttagccatctaaccctttgaacataattcagaactatgcatcagcctctccttttccctttacggccacacctacctcccttcattatggaaatatcttcatgattcatatttaagacttcagagtgataatttccaattttagctgttataaatactgctactgtgaacatttgtccacatattatttttatagccatatgtttttacattatggtgtactcaggattaaattgcctggccacacggtaattctattcagctattagagcactttgatttccaaaataaggacaatgttgtgtactgtggtgactgattttatgatcaaatgcaccattagttcagcggtttcaactataacattttacaccccccttttaaacctctaccttaagtgaagcacacttgccttttctaagagaaattaagcagcagctagaatgtccagtctgtgactcagtctaggtgcccgggcaactgtttgtgattctagctctgcagttggtgcttaagttcagccaggccctgcctgccaccatgcacctctctgtactctctcaagcgaggtctcttgttgctcagctccacagccacatcgactaactgagcagctgccctttcctcactcatttcctctccactgccctcaaaggagccttcctatttggtgggcattctgttgcatgttagcgcagctgactcatccctgctttcatagggcaagggaactaagttttctgccatgaatacaagagttcctgttttccacctcatggtgagagtaaattcccaagggctgttgtgctgctaaaataggggctgctggctaaatagaaaaggataatgtgccctgagtgctgtaggtcatttcttacagtttcccagtctgaggaggaaaagcaaaggagattgcgaagattcattgttttcaaaggaagtgtcctcatggaagtgtagagtcagttggtgtaaacatgataggctgtgtaaatctgtcttatgtgctcaaaattaaactttttctcagtcacaaatgaagtgcttagaagctttgtggcacaatcttatataggatttcttgatctaaagtcctcatttccagctgtgacacatgtgtatgtaagatctgcattgcagtgtctggtttaaagatgcagtataagcttagacacaggtcctgtctgcacttaccatctaacctctgtggtaagaagtgttaatgaacgcctgttatgtttcacatatttctgcacaaatatttaagggacagcataaaatctttcatttatttgttttactttgctgaatttattctaggttggttcttacttgaaatctccaaaattccctatttggattgttggcagcgaaactcacctcaccgtattttttgccaaggtatgcttataggggacttttttttttccacaatgatattagccaaacaagtaatattgtgagtccatatttagtttgatctttgtgcagatgaaaatccagccagtaataaatggaatgtttcccagaaatcttatcagttcacactacagaaaacactgttgctttgctctggggttggagtcacctcagtgaagtccttcctgactccattacatgtctttatctctgctgactcaagagctctggcttttgattttgtttagaagttgctgagatgtggaagaaaccattttagttttattttagattcttacataaaatggtttctaaatctttctttttaacaagacgtaatattttccacagtggggtggtaaaagctttggcatcaaacaccttcatttaaaccctagtttctttgcaacatctcttgggctcttttcctctgtgtttacagtagggctttttaacagtacctaggtcttagaagtgctgtcagccttaaatctaagatatttagtggtgtctagcacaagacaagtgctcattactctatgaaaagttttccaatgtctctgatgctgttaagaacaaagtgtcagagcgtggactgatgcgggcaatgtaaaagtgtgtccttgaggttccttactccaagagactctgggagtacgcgtttcccagggtaaggtcccgtctctaagaattctatcactttcactgaactggtaacctcatttttattttattttcttcctgcttttattgtgttagccagcgtccagcttacagctacagagtaaggtacatgttacttttccttaacctggaaactgtataaaagtacaggccaccatgatacatgagcgttgttgttcatttccctttcaaattagggaggataaaatcaaactcagaagcaggaaacatataattccgaacaaatatttcactatatatttctagaaaagataatcagtttaaatttacatggatagtgtatttttaaaacaattactttatgtccaaccctattctttagcattaggaaaactgatatgaaactatacaagtgtatttgtggagggggcacttgaaattttggggaagggctcttattatatagccagggctgatactgtacaagaatcttcctgcatcaatggaaaaattacataaatagtaaatgaaactattaacattcatttgagttcaatttaaaatattttaaaatataaagtctttgtatactcttcattacatagaaaatactagaagctttgctgttcttataattataaaaggaactattcattattagtttgaccttttgagcattcagaattttcctatatcaaaatactttattttgagcattcacatttacctatattttcgctgttattttttgtagtttgttttgatttttgtctgttactttgtgattaatttattcactctatatgccctatggcctcaaagaaacataagttgaatcccccatcttttattagaaataaactatcatattacatgaaattgacctgtaaggtcatttccacagactgctctgtgtgccgtgttcttggtttttactggatggagttaggcccctttgttctgtgctcacaggtttcagcagcctataaggaagcattgtttcttgtctgcaaatggttggagacctgatgcactgtacagaggctgcagctgtgttcctttattcctatgcttggttatcagatggtttctcgggatagtttatgcctggagttatgccaggtgctgtgaatgcagtgttaaacaaacatagacattgttcctgctcttgcagaagtatgtatctgaatggaggaggccatggctgatgctcagaagtttccaagagtgataagtcttgacaaagcttaggtctataataccacaaggattcttctgagctttggaaagctgtgatgtttcctagaggagttgatatctgaagtgagcactgaggtagcagtggacttaaactagggaggagaggaaagcaggagctactaaggaagtagttggagcaaacgaacctcctcagaaggagagccacctgaaagaaaagagctggacacccagaagcagggaggcaggaggcagggaatgctgggtcgagagtgttccatgttactccgtagcctgagcggacagactcatagccactgcacttggcaagaatctcagggattcagttcagggactgtaagaagaacaagcctaaatttgcattttgaaaaggtcattatggctaattgcagaaaacagacatgttgaaaaataacccaggtgatccgtaaaacagatttttatcatttttatgggaagtggtataattgttataattcagtccagggtaatttttttattatcctttgataatttcatgtatgcatataatgcatctttgttatcacactcccccattccttcctctaacttcttctgaatggatcccctaccgctctaccccatctcccaatttttttcttaataattaagtgaggccagtctgagctgcgcatatgtgaatggttgtgggcgtccacatggtctgtctactgcagagcacacgacacctcacctccacccaacagtctgcagctctgcccagtagcttctcagctggggctgagccggtacagttgtattgggtcaagtgctggagcaggagtctcagttatttacaggagcagaaatgactcaaaaacatctgcttcgcccaaagcaggtgtcaccaagatggatgacaccacaacctgagtgacagctcctgaaagttggaaacctggagtttactgtataacttataggtagcttttaatagggcatgttgttgttgttttgtttcaggtaactgtgctggtctctgcctctcccaggcagcttgtctgatctctcctttccaggcagcccagctggtctggaagtgtctctcagcagtctttgctgcttctgtaatctggggagtaaagggcctagtgcatatggccaggtcagtttagggactttctgaagcttcagaatgcttatggaatctttacacttctccctttagaatctcctgagtgttgaggagcttccttctaaaatggaaacgatttcagaaagttactgcagggtatctgagacctcttcccagccatggagtctaggtcagatttacagtattaggcatccatttcttctcatggagcagcccttaaatctaataaggaagctgttgcttacccctataacatttgtgccgcaattgtactatgggcttatcttttcaagctggttatcattgtagctcacagtatttgcagttgcatgcgattgcgaatgacttttctctcccagaagcctacttcgattcttccagtaagcactatgagagctagccatcagggaaaacattgttttcccactacctgcttgatttctccctgcactgtgaccagagtatatagtatgttcagcaatggcctatcactgtcaagttctgatgagctacctagagcactgccaataatctgtcttgatggggtaggggagctccgtgatccttctaacaactggatggaaggcacccctcatttggcattaggaaaataataaaaatttggcactctagtgcttctgggaagagcattatctcctatgtagagaaatgtgaatttaaacccttaagggtgtgtgtgtgtgtgtgtgtgtgtgtgtgtgtgtttaggaagcttataaaataggttttcatatggcttttaattattccccttcctatagcctcctatgtactagccttctgtgggtctccccactcttgtagatagttgaccaaggcaaaggaagcagggatatggaattggaaggtgggatgggtgggggagggggagggggattggaagccctgtgaatatgtatagttaataaccacaccaggatcaactatcaggaggcagatcaactttacttaaactcacagtttataaagttttgggggacctagagtaggagcatccaggatgggcaaaagtcatgggctagggcttaggggacctgaaatgcctcattagcatggggaactgttcaggaatctcaggcactggctgaagaggttttaacaggagaaaggaaattgatcctgtaatctgattgaggctatgtgacattctacatatgtagaggcatatgcaacagcttagaattccccagacaaggtcagagaaggagaagccctgctaatgaagggagtctcccatgttgtgccaagcccagaggctatccagtcatggtggactttgaccttaattagcagagtttacccacttctcccccagatttattttttaatggagaaatgtcattaaagtattcaaccccctatattggggacagcttggtattgaactagaacccaattagcagtaacttttacaatgctgttttaaaaagtggataaggcagagtgtgaacatcaaaatcaaacaaagcataaaccagcagggaattgaggggtgggagccaggaagacaagggtttactgaaccaacttaattgctcggtggactgaaatcttgagagcaagtctgtacagaggtttttgttattttgggttctttcggttttttgtttgtttgtttttgagggtgtaagcattgaactcaaacaatatttgattcatttacatagacataacattttttttttctcagtactatgcaagtccccccaagtttagtagccattaggccccagcaagatccaaggctgttaactgtggatgtcagtgcctgcttgtcttaagtctccagtcagcaagtgtgtctagacaaagaccccaggcaagtgggaggaagatggcgggtcagtctcagtctggcctgcagaggcagtgctgctttcttttcctgagagagagaaacctgtagtgatcataacagggttgtagaaccctggtgggggttatctgtacaagggttctatactgttttcttttcttacaccaaaagaagagaggggataatgaatgcacacattaaatggtatactttgattgtcagcacatcaggcatcccttgctctaaacccattagcagtttaatgggtgttaaaggaattttaatcctggaagtgggaagttacattagggaaaacagagggaagggctgggatttattgatcttatctttttaaggtagctgtgaaggaaaactccatgttaattatagatgtgaaatgaacagtaaccgattgtctgtgaaaaataaattggctttaatagacattaattgaagattaagtaatagttgttaatgtagttcctttgacctgtgagaggtagatctaaggtgatcctctgaagcctaaaagaatttttaagtttacaaaaagagataaattgtatttatgtccatattaccatcatttgtaatctaaaaacaattttgggataaaagtatgaacattcttttaggtagtcctcttgctagggaaaaacaaacatttaaacaaaatttctttagacaaagaagcatgaaaattctaagtttggggtgagctgctgttgttccaagctatattatctccatctgcaaaagcaaaactctacccttcattcctgggatgcaggcttacagacagagaccacttgtagtctgcctgctcagaggatttgacgtggcagtgggtccagctgtgccagtgatctggctagtccttcctgctcctggtctcgggaggaaactgactttgccattgccagttaattgctttggctgtcgtctttggggccctggccataggctaggtcttaccctataagggatggaacagtactcctggcagagtgttcccccaccctgccatcctatttcctacttaaacgcttcccctatcattccccctttcaaatgtcttctaaggtaattctctacctttaagatctattttcctcctattcttcctcttctgccatctttttttcccttcgccaaagcaggccctttctgaagtgcctcagagtaatagtgtagagtcagataaagtacatgagtgagaaatgtgctcctgaggtaaaatggcaggacttggagatgctttgggtttttgtagacaagatgtagaaatgtctaatgagatatgtgtgtaatgattagagttgaagggactcaatggcatgtgcttaacagctatgctattttaaaattttttatccaatttttttatccaattgaaaccttgtctcaactccccaacccaccccacccccaaaaaaacaaaaaccaaaaaaaaaaccaaacaaacaaaaacagagaacacagtggaagatggtgatttcaatttagttgctgaacttagtgctcaccttgttgtataggagatgcccagtgacctagaacttaacctttcaagctgttggtatctctttctgacctacaaagagaaatcatctttataagattgtaagaaaattttatcagctattggttccatcagtaagaagaatattaccattttttgaacatattagaggaccatactgaaaatgtattacatattttatgaaattttctctgattttaaatttgaacttttcactgtgtttgtagattatcttttctgatagactagtgtttttttgttttgttttgtttttttggtttttagagacagggtttctctgtgtaaccctggctgtcctagaactcactctatagaccaggttgacctcgaactcagaaatgcaccaggctctgcctcccaagtgctgggattaaaggcgtgcgccaccaccgaccagctactactggtctttttaaagctctaactaaacattagcctgtgttaaaagcaaagttggtattgctctcgctgacacagtatcctaaggagtctgctagacaaactcataaaagctgccctatgctgattcttgtcttaagggaaggtcacagaatctccctgtggagccttatggaaatggcagagtagtcaagccgcagagttcccacaggaccttctaatagggatgcaggcaggcaggatgcagtaagtaaatggacccttcctttcaagaaggaaactgaactcctattaagttgagtagggaatgtttcatgctggctatctgagctttggcagaacaaaaagtttattctgccaaagggaatatgccctgtgggcatgagtctgcaggaatccctctgtggtacctctgatggtgtagggaacttgcaaactcactgcacaagaaaaagagtccttgtgcagtagtctttcaaagttgatccttaaagagtttagcactcaaacttactttgtctttttaagtctttcccttgactatcagaagatgaagctagttcttattaaataaggcctcactggatgagtgtgttcttcgtggaaggagctgcatccacatgtccctagtcagtgaacttctcaaagtcgcacgtgcctgcatgagacatgcttgcacacttaaaggctgcagtgtgacaggctcctgctgtgtgacaggctcttgccgtgtgacaggctcagtgtttgggtcgttgtcctcttagcttgttctcctccaaccatgattttcacctgggactctctgcctctttttgttaatgggtttaggaattaattgcctggaatactttgttctttgagaactttacatttgaaaataatactttagatattattggatggtcatcttattgtgcattttagcctaactgtgggttagtcattgctaaaccaacattttaaaaaattgttactaacctaaacaactcaaggagttttggtttcaaaagaacaaggtctaaattcttgtcaaagtcatttcaagtttccttttgatgttgatgtgatatttgtagccttgattttgtcctattttggagctgtaaaatctcattttcatatattctctctccctctctctcctttctctctgtacgtgtgcattcacacgtgcatgcacacacattcacacatacatgtatgcacagtatcatctttgatctttcctataataaagtgcatttcctctcaggtaagagcatatgaatacacattatcatttaaacagaaattacataaagaagcttaatttagtgtaaaggagaaacacagtatacagtgcaccgtatttctgtgattgcagtgcagagcaggctactctgtgtggtgacccatttaccaccacagtgaagtaagagggagtgagatcctttctttaggtcctttcaaacttctcagttctgttgtagtggaaaataaatggaatgttttatagtctttaatgtttagtattctgaggaaaaatagcccttatgtatctttaattattggataaaactcttgagaattaaaatacgtaattcctgagcattctggaataatttacttctgtatcttagtgaagctaatcatcttatccgtctgtcttagatcttactatttctgctaatgtttatattttataacagacacgacaggagaagaatagatttaagaaactaaagtatttattttagattaaatcataatttgtgtaacttaacatgttttccaaaataaatataacaaataattttacctaaaatatttgaaagtttgataagaagtctatacaaattagtcattttcaattattttggtcttaaaaacatgaagttttaactataagctttcctaagcttagcatattttaggctaatttattaatttaagattctgttgatgatttgtatcaccaccaaagaagggaacctttctgtttttgatgactttagcaggactgtggagtagactgtcagtgtcctgcctggacttaagcattccttgtcctgttgtcctctctgctgtgctctggctgagtgcattatctgctgtggttaactgtgaccctccatcacagtggattgtctgctgtggataactgcagccttcctctgcctcagtgtccctgcttccaggaagcagggcctgccccccttgtctgttgcaatagagaatcaaatgattgcctaaagaagatagagcatcctgggcggggggccttaaagctgttctgtcttgataaagcctggttttctttagccggtggttgagtccacagctttagctatttaattgaaggaaaagactgtagtcagtagagtttattactggaagtagcttttattttatataaatattatatacttaatatatgatcattcctaaatgtgcttactgaaatcttggtctacagttttggtctagccttgacatctttgacaatgtgattgctaactcttgctttgtttttaattcttactgaattatctatataaaatagggaaattgaaagagtattttctaaattgctctaaaggcagaccaaatatagtagcagtcttgatacattacaaagtaggtacccagaagcattgggcatgaagcatctggccggattaaaaagatagttacacatgtgggtttcacatgtacagcaatggagagagggctactcatttctcttagtgacgttaatgattatagtgcaggaatttcttattgcccttacagacattgcctcccattgctgtgtgcttttactatgcatgtagagcttagagttgtgtggacgaacaatctcaaaggctttttctatgctgatgacttgggttttgctcttacaacaggaaaagtaccacatagcatggctactgtggaggtagcctggggcttctgcatgttttttaaaactgaaaacttaaaaaaaaaaaaaaaaaaaaaaaagactgctacttacctagctttaaatgatactatgtgttttgagaacatttaatggttaactaaaaaatatttcttaaaaaaaacaaaaacaaaaacaaaaaaaatatttcttggtagttcccaaatgattttttgtataattaacaagaccaagtcaggatgaagtagattatgaagtggctttagattttacttaaaatcaaaagtcagttacatttctcttctggtttggagggactcttaatggcaatataaactgtctgcaggttaaaatagcgtttttgtagctgcacttgctgcactgggtaactaacctgctcgaggttctttgattacaaccacagattcttcttgatggtggagaaaggtgtgatgagcagattttaaagacctcctcagttaccctgctggtacctagccagcacgggcctgcatttcaatacacattaagaagaggtaaagttacaacattgtaaaaagactgtgtgcaggcgaataattatgctgataggacacagaatgctgcatgaaacagagacatggctcagattcctgactgtggcatattgggtatgccctttgtatctcagttcctgcttctctgcctcagaacagcactagttaacaggaatgaagctggctggtcttgaaggctgtggtgttctccagcagtccctgttgacctctaaatgagctaaagacagatgactcatcctaagagcgccatggccaaagcactgattgtgtcatgcgaatatatagaggtcattttaggacaaaaataattttgaaggtaactctaactgaacacatttgacttttgtgtttaagatgttttcttcccaagagaatttgaaagccaggcgtggtggcgcacacctttaatcccagcactcaggaggcagaggcaggcagatttctgagatcgaggccagcctggtctacagagtgagttccaggacagccagggctacacagagaaaccctgtctcgaaaagagagagagagagagagagagagagagaatatttgagtttcggatgctttaaccttttgcagctctttcctaagtggttagagtagagatgaagaaaaggcaagtaactctgacaatgtgagtgacttagaagtacatcatcaaggcctcttcagttagaactcagtgctgggtgcgagattggaggctgagtggtatctatttgaacatcacattataaggtaattttgttaagatcactataatgaaaatgttgtaagtactgtgacatgaagtgcaaagataaagtctttctttacagactaataggtgagccaaagtgaggaagagctagtcgaggagaaggagaaactatggatgtgtgtattggaagactggcaatgtgctaaatgggaatgaagtgtgagagttcttactgtcttagaagtagaaactctgaaggagagagtcctcttcatactcacacaattattcatgaaagttttagtttatttcctcgatgtaaaataggaaatttgagaattatgatgccctcactgaagtattctgctttaggattataaaacactccagggggctggtgagatgggtcagtggttaagagcgccgactactcttctcaaggtcctgagttcaaatcccagcaaccacatggtggctcacaaccatccataatgagatctgatgccctcttctggagtgtctgaacccagctctagtatactacatataataaataaataaatctttaaaaaaaaaacactccaaattaagaaggagttatatttctggttaaatttggtacacaaatacattgaatatgcagccaaatttgccacatggatcccgcagccatggctctttatgctaggaactttgcttctccccagcatcctgacagagcaaggtggccagcagaaccaagagaacaatgtgctcttttgttcaagtctcatatcttgctgggttagcatggaacatgcttttatcttttgatgcttggaatttagacacaaggcacctttaagttctttcttgtgagtctgtgtttgagacacttctgctggggatgttaatgtaacccttcttgttccagtggaaatggcagtgtctcttccctcaactttacaaacaaaagtacatttcccaaagttcacttaagaatagtaacataacgctttgtttatattatcggccaactcattcccctaaatggagtaatttgcttctgttcttacacagaatactactgtagttctttattacaaattgtaaatgtataggtataaatttgtggagtgtaaagaaatattttaactcatgaactcactatggaagtaagttagtgtccattacctccaacccttaggatatttggggagaatacttaagatttaccatctaaacagttttgaggtgtagtcacctactgtctgtacttctcatagtatgtactagaactgaaagggaaaaccttccttcagtcgccctattcctcttatgccccatcttctgtaatcaccattctgatctatgcttgtgaattcagttgctttagagtttacacatcagtgagaagaagaaccacttacccttctgtgcctggctcatcctgcaatcgtttccagttctggggctggtagtggaaatgaccatagttctttttgttaagactgaggagcgttccattgtatgctgcttttgttaattcattcatctattatgagacatttgatttgtttctatgacttgacagtgcacctgacttcaaatctttagggttatcccaaagttttgggattgctggattttacagtagttctttcagagaatttccacacggttttttcaaaatggctgggctgttgtacattaattcctaaccaccatggcaacagctattttaactttcttgctgacatttgtcttttctgacagtaacaaggaaatttcatattttttgccataacttgcatttcccagagtcccaatactgagctttttcatttgtttgttttcagttaattatgtggcattttgtgtgtcttgagaaatgtctagtcatgtacctccccactttttaaattggatttttgttttcttaatattaaatttgggctccttatatatttgagatagtaactctttatgacatggtttacaagtatgggttttaaatttggctgttgctggctttagtcctgggatttggagtgagaccctggaatcactgccatggccagtgtcatttggtttttccctattgttttcttctgtagttatagagttctttttcgtacgttgaagttgtgatccattttgaaatgatgctcatatctgatgtgaactacgagtccaattccattgcttttgatgtggaaatccattcttccttacagtgtaaagacacctctctctgcctattaatctatttttaataattattactctgtatgtatgtgcacaaacatgcacacacagaagtcagagaaagactttcaggaattttccttccactatatgattaacaggattgaattcaagttgtcagccttggcagcaagcaccttcctcactgggccatctcgatggtgttatttaagctcaattgcatgccaagattaatttctgggctgtgtgttctgtactgatagtcagcatgcaacacggctttatcagcacactctttatcagcaccatactcttgttcccttttgttctttgtgcttgtcactgcttgcctattgaagtcctttggtggctcttttgtggaattttaagattcttttctctatttctatgaaaaagatattaaaattttagtagatactgcattgaatctacaaatcactctgggcagtatgaacattttacagtggtaatccttctgctccatggttatgagagaccacaatgaataattacataccaaaaaataacctaagaaaattaatttctttgacaagtacaactatctaattatatttaaaaagtaatttaagaaaatgagaggaaggagtactttggactctggatccagcactgcactgacacctaaagtagacagtggctacacaaggcaggtcaggcagggttgggatactcatgtgatcacagcacacaggaggcttggggagaggagaagcacgggttacacaacaggaagacaaaatggcaggaaaggagggaagccagcatccttgatggtcacagacacaaaattcagcaaatgtgagcacatggaattcagcaccatataaaacagatagtgtaaatggaatttttaaatgttatttaataactattattactaatatgacccagcaagccctcccaataattgaagcagagtcctatggaatttttaaaatcagctttagcacaattactgggtgaattttccttaatctatttttctatacacttcactgttaattctctagcttcgttccccaagtatttgccatttgagtcttgcctggcttatttctgctctaccagtctgtcctcactgggccaagtgttcctggtctatgacatctaaggaagaccccctgctccccatatcatatttctccttctcccctttccccttttcccttctcccttctcccttcctcctcctcctcctcctcctcctcctcctcctcctcctcctcctnnnnnnnnnnnnnnnnnnnnnnnnnnnnnnnnnnnnnnnnnnnnncctcctcctcctcctcctcttcctcttcttcctctttttagtggtccctacatgctactcccagcccaggaacttaagttctgtctacgtctattctccatggtaattgactgtagctatttttatttaaccagtagctttaaattggggaacaaggcttatacaacatcatttggtgtacatgaggatctgcttgcagaggcaaccaagtcttgggggccaatatttagcatttgagtacaaagcagcaccaatccaaccaaatcatccacacccaggattgcgttactggcatatggggatgttccaagataccaatcaatacgtatgacacagcacgccaaaagaacgaaggatactagctttatgattagcttactggatgggggagggcaaaagcatatgacaggattcagtatgtttagatgagtaaaactccaccaagatttttatagaaggcattcacctcagcacagtaaagactttatgcaagaagcctacagattctcaacagtgaaatactgaaagcttttcctctgagctctggaagaggacaaaaacttctacactcagtccttatgtttgcaattgtgttgaatgtccttcccagagcagtcaggagtagaagaaacaaactcacctggtgatggtgggatcttccataggaaatgctacagcttgaaaacactgttgaaactaccaaaatgtagtgaagagtgtgtcagcctccatttataatagctacaaaaagtaccaaggaataactaagacaaggacttgaacgatctacactctgaaaatggtgagccaccagtgactaaaattaaaggaacatatacatgggaagatgcctttagtcatgaaatgggcaaaggaagaggcttggtttttaaacaagaaaagcctgatttttttccttcccttctatagttttaagtgatgtttagaaactctgtgaaatttttaaagtgtattaaactcatcttctcattgctaattgataatacagaagggagggtaaacagacagataggaaaaatgagcatccatttgcacacagttgaaacctctgctctcaagctgctgccggccagcactgtacatgtagtcatccactggctcccacaaacctacagaagagaactgagggagagagggagggagggacggagggagggagggagggagggagggagggagggagggagggagggagggagggagaaaggatggattattaatagttaaaggggctaatgcttatactagaataaacgtagaatatagatagctaaggaataatactatctccaatgttaacagttgctccaagactcttgagaactgggtgacaatcctagctttagcccagaaatacactgaaggctatgttggtgatgtgatttttaagaagcgctgttcaagaaacttgttatgttcttagtagaatacttacctagggtaggtgaagtcctggattctatctccacatcttataacctggagagaagtgcatatatattatttcaacactcactggacaggtgtcagaaatcagaagttcaaataatctttaccttcataatgagtttatggccaacctgctatatgtgagactctgtccaaaaacaaaacaatgtttgaaataagtaggcaaacatgatttacagctctctagtgcctaccataattgcaaattattcttcctatgatccagcaacccacagtagatctctcccacaaatacaattaagcctgcataaggctattccttcacatttctttgatgcgttgtttatgatggcaaaagattagacagagcccacgaaatcagcaagtagggaagtgaatcacaaattcagaacagcattgaaaattaaaccaaagacgacagtgcttggcatatgcagagtaacactgagtatgtaggcagggtctttggggtggaaagcatgagataacatccacaactgaatcacgtaaaacagcaaggcctttcactcttctttgatggagtacataaaagtacgtaagtctggtgtgattgcattgcttcggttcccagtcctgagtttcataagaacagtacatgcccttccaccctgaggaaggtggtccaggagcaggtaagacctcctgtcactggttctttttgttccttccttcataaatgagatatgggtgggtaaggctacaagttagagtatctttctttgaaatttgcccataaaacattttaaattttaacatttatacctcaaagctgttgtgttttgttttctgtgtttgatttggtttgagatgatcttgctgtgtagccctgattgaggtttgagatggtgtgaaaggatgcctgttctttgatgaggtgtgtctcaccgaacacaaatataattgaaagctcagacagaggctacaaccagtcatcaacacagggccctcaattctgctttcttgtcatcagaagtaggatgtcgcagaggcttagatatgagcaatggggttgtatagagaagcaatagcaacagggtgctgtgagtctgctgcagttttgatgagcagtgatacccactgtggtgaagaaactcaatctatgaaggatctataaccctgctataataactctttggaagctaaattggacatacagaacttgatacatgtgttacattgctcttttctagtgtggtaactggcattacagtcctatgtgtgattgcactttagtctttgctattagaaaaatctcatagttttgattccttgcaaactatagagtgttatgtcatatattttttgtcattggaaattagaggatattttaagctatgtatttctttacataaacagtagtatataatacacttacaggtcatgggttttctgaattttaaattttatattaattgcttttataatgttagcatgaaatccttttagttttctgtggcttaagtcttatttccatccttggaaagtaaagctgggcactggagagagttggtgatttctctgcctactctcctatgctgcatttattctgtctacaaatgccatcatttttccaccccatgtgagcgttcactgttgataccacagtgttgcatctggttgatagtattcatttgatttttaggatatggctttagttgcccctgaagcgccttcggaacaagccagaagagttttccaaacctatgatccggaaggtaagcatttgtcaatacattgtatggctctatatcagaaatatcaaaactcgggttgtattcaaaagatgaattggattattaaatggaaaataggtggaagttcttttaaagaaaaaaaaaaaaaaaacttaggagaagcagcaaaaatggaaatcaaagagaccaagcagcaaagctagcagaccatggctcccatcaaattctaccgctgagtgaatgtgtttcttcagatcctgacttctacttacactacgtgtcaaaggtcaggattcacgtatgtaatagtctttcttagttcctgatcttaacaaacattgaatgaccagatcagggcctagagagatggctcagcagttagagcattgctctgctcttatagaagatccaaatgtggttcctagtacccataggtaggctcacctgcaagtcctgctccaggacatcggatacttatggcctacacacacacacacacaaacacacacacacacacacacacacacactaaaaagtaattgaacaaaaaaatttcatgtgaaagaatatcatcctgatcatttaccttctgatctcatatttactctaccaaagtgagttttgaaaatggcacatttatatcatttatatgtcctccgaggagttttgatggccttttctttctgtactgagttaaagactatgccttaaccttgtatctgcctcccttaaagtcaccttattctgacataagccatcacattgaaaccaaagttgttaggtcaggggagtcctttggagctctgaaaacctcagttgttcctgtgtcccctgtcttcagcaggaagctctttactcttgacaccgtccttccccttagcaaggctgctttactcttgacaccgtccttccccttagcaaggctgctttctaagggttctgcgctcactgcctggtcatggagcagcattgttgatgagtaacagaaaaggcggaaaatgaaaagtcattgcaggactaagcctagaggttgcttggccgggggcattgatgagaaaagacctccctaaggtagatcattttaggaagcggtattattcgagggtgaagaacacgttttgcttgcttacttcttatttaatattttggtttacatagccttgctttactaacacacatgcaaatttggagatgaaaatctttttccttaatactttttccctctagtagaagcatgaattatattgtttaaattatattacattccccaccatgacaatagaataaatgaatgggcttgtactggccaccaccagtagcactttttcagggacaccacatcttatacctgctttgttttatttttttaagatttacttttattttgtatatgtgtattgtgtatgccaagcatggggttaggtaataccacatgtacgcaggtactctctgaggccagagagggtatcaggtaccctgaagctagaaattaaaagtggttgtgaggcacccaatgtgaatcctggcattttctgcaaaagcagcgagtgttcctaactactgagctgtctcggcccctacgtatcccatattagaaacataatggtgactggtatttgtgtggaacattacaacttagaaaacgttttacctccatgaatatattaaagccatgtcatgctttaatttagtgttaaacttttaatttaatatttatttaacactaatattaattttaatatcaatttaataaactagtttattattactattatcgctattaataattgatattatcaactactagtgatttaatattaatttaatagtaaagccacctgtatgtggctggtgatatgggtcagtgaggaagtatttgctatgctggcataaagaattaaatttagcttcccaaaacccacataaaggtagccagccatgttggtgtgtgcttgtgattgcactgctgaggacacggagacaggaagagctctgaacctcacaggctggccagctagccaagctaaatcatcgagctctgggctcagtgagagacctgcctcaataataaggtggaaaggaagtgaggaaaacacccaacatccacctctcacctgcacacacataagtgcgcacacacttatgaatacacatagacacccacagtgacacacacacaatctttgccatgaatctacgagatagatactatcacctttttttcccagtgtttgtatgtttaactttcaaaggtacgtacgtatttttaagaaccaagagtagcttctagatgttctagaccaagaaatctcaacccctccgagataaccaatgtctgtgttaggactgaagtcataaagatgctcaagccgctctgaacttgttggcattagactgctgctaagaatttggtattgactctccatttgcttgagcaattagaatagtatgtattttagattcttcaaaattctagaaatctgctacttatttggatgtcaaacaaagttatgagatcaaaggtgtattttttaaattgctaatttctcatttggaatattatcaaaagtttaattttagcaatgccttattataccattttaattacttggcagggtttcatgactaaatcacagattaaaagatggcaataataagcagctgctcagaacatagttggaacagtttatcaggcagcataccctcatgtacaaacctttaagcacatccacagttttatctgttgatcatttcatggaggaaagtatttggatctgggctttgctctcaggtaattgctataataggaatttttcttgagtagcaatgaagttaaaagaatgaatgaagctagactgactgaagtgtccagacaaaggcagcagaggcattttctattgtgcttcctaagatgctgaatgtcaggtcgagatctgtgatggccaataagcagggggacttttccagattagtgttcctgtctgttgatggccaaataaaatctgtttgacatttagaggctctgggcttttagctgtgacttaactaagcaaaaatattttttttctatctttccaattcatcaaagcaagcttatgggcttgaatgtctttgaaagtgctttcaaacaaattattttattctttagacctcaaattatttgtagctggacaagttgtagttacactaacccttcacgttaaaatctgtgcacttttaattatcacaaatgatctggagcctttaaagcaaggtcagtctgtcttgaaaagggtgacttctgatagtcctggcctgcctgggcctataaaatgaggcatcccaggtgagcaactgcttcctttattctgtagtttgttgtaggacttttagacacattttttagaaaattacccaacccttgaaaaaaaacataatgttggttgctaatggaaagtagaggcagtctcctggaatgagtgattgtgccttgtgcatggaagggaataagccagtgacagttcagaatcgctgccgtccagagccttttgtgtcaatgtatttttcacatcagcagagttggggccactttctaggctgttttgtgtatatacagccaccatttttgttgtcaacacttaacttcttcataagttttcaaatgtaaatacaacatttccatgtcatgcctctagttctcccatgtgccttcttgctctctcaaattcttgtcctcttttttaatcaaatgttacatatgtatgtgtatgtattccttgatcataattacaacctgcctagtctgtataattagttatttgtatgtatgtgacctcagggctgaccatttgtggataccgaactgaagggctcttccccaaagaaggctgtattcccattcttagcacttgttcgttgcctggagtgcgttgtctagggtggagtacctaagatttcctctttccctggtactgtgtttattgttatctgtgttcagggcttgtttagacagacatgctgttgagacttcatggatgtagtttccctggcatgtctaggagatgaactctctcagagactttggctcatacagtttttctgtcccctcttgaaccatgttccctgagccttacgtacagttgttgtgttgcaaatacgtttgggagctcttacgtgtaacatgtcatcagcaaatagggatagtgtaatttctttttctgcttacactcctttaatttctctctctcgccttactgcttcagattgtgcttcaagcgccatattgaaaaggagtggagacagtgagcagacttgtcttgtttccggtctcagtggggtcgctgccagtttctgtcatcttaggatgaagttacctatgggtttctcatatataactttagtatgttgagtgtcttagttaaggttttactgctgtgaacagacaccatgagcaaagcaactctttctttttcttttttcttttttggtttttcgagacagggtttctctgtgtagccctggctgtcctggaactcactctgtagaccaggctggcctcgaactcagaaatctgcctgcctctgcctcccaagtgctgggattaaaggcgtgcgccaccaccaccaccacccagcttacaaagcaactcttataaggacaatatttgattggggctggcttacctgttcagaggtgcagtccattatcatcaaggcatggcagtgtccaggcaggcatgctgtatgaggagccgagagttctatatcttcatctgaagactgctagcagaatactggcttccagacagcgaggatgagggtcttaaagcccaccacccacagtgcacacttactccaatgaggctaaatctcctaatagtgccactccctgagccaaacatattcaaaccaccatattctactccctggcccccataggcttgttcaaacacatgagtctctgcatctccgtgtcttgacggcaaagcagtcttcagatctctactcctttttcatctttgttgactgcacaaacttttctcctgtgctcattccattccccattagtagctttcctcagcaggtatcccatggttctagcatcttttaaatcttggggtctccaagtgaacttcaacttcacagcttctttttccagtgtctggaatccacacatgatcttctgggctcctccaaagggcttgcattatttctccagctctgccctctgtagtactctaggctctgattgattccactccaatgctgctgctattcttggtggtgatcccatggtacggacatttctaatacactggggtctttagctgcaactaggcttcaccaatagcctctcataggctctcttcatggcaccaagcctcaacttctttgcatgaccccttcaatcctggcccatcgtctgcaactaaggctgcaccttccttcaccagtgacattccctggtctctcagtgtcccagcctcagctgctcaccacaagcccttcgtgccttcaaaaccagtatcacttaaataattcttacacattaccaagtcgagctgcaccaggaggtacaatcttggcaatctctggaacacagcttctttgtgctctcagaaaacacttcccagatttcacatcagtgatgctgatctcttcttaaacaccactaatttcttttctccagctaaccagcatcaactatcccagtaattgcttctattctttactctacagctggagtcacatggccgaagctgcatagttctgctgcttgccagggctggaacatgtccccatattatactatattatattatgttatattatattatattatcgccagctttctgttttccaactttcactccctaagcttggctgtcctggaacttgctctgtagattgaccttgaactcagatatctgcatgcctgtcttctaagtgctgggattaaaggtgtggtttaccacatagaggtttttttttctatctaaaacttgctgtgtctcaggctggccttgaaatcagagatctgcttgcctctgtctcttaaaattaaaggtgtgtaccaccttgcctgagcctaagcttttcatggccattgttccttaagatccagaaaaaaaaaaaaagaaagtccaagtgaaaaaattatccaaataacaataatgcctaacatgatataactattccttgtccaatggcaaacacacaaacaataagcttggctgggtgggattatgcccttactctgtttatctccttgaatacaggattcagctccatttcacttcgtggtgtctgtttattacttgaaccatacattttatatttttcctttctaagtttgctatgcttgttcaaaatgttcttcctgagacttaaccagagaacaaagtctctgttggactttcttgagacttccattgtcaatgcaattaatataaatctctttaccttagcctcaggtacactcttcaggcttaggtagaatgaagtcagatgaactcctgggggccggattggcacacagaatgtgaattctggtgaatatcttgaatatgaaggcagatctgagattgggagaggtatatggagcagacagaccatcagatagagttcccggctagacgctggtacaagatggataagatttagctgggcagagagattagatacagagaggaaggagcctgcagactgtaagcaggtggcatgctcctatgttgagcctggaatttgcggacagcacatttgcctccactacatttcagctttagcttttttatgcaggtgtgttggtgatattttgtcatgtttagttggaatgttttttttaactgaatctgtagctattagttaatgtgaagcctatttcaagattttttttcttagttttacaccatcagttatctaaatagaactggatcactccatttagtaaaatgaaactgtaacaaacagaatttgtgctgggtggtggtgattcatgcctttaatcccatcagtctgtaggcagagacaggcataagtttgagaccagctaggtctacagaacatgttccagaacagccaaagatacacagagaaactctgatttaaaaacaaacaaacaaacaaaagaatttgttgtaaataattctgttcacttgatttcttcatgacaatttaaagatttagctaatacctgagtgatgttgttattttaagtggaaagagtttttacccatttgcaggtttgtcaagctcctctattaaaaaataggttaaccttaaagtttaattggagttcataagtcgattttttttcctcccttgaagataaatctttgattatatgtctaagaaaattcatctgagcaagtacctaggagcaatgagctttactgcaaaaaaaaaaaaaaaaaaagttcttcaactctttgtattcctatgaagtcctccgctcctccccaggacctgatcagaaatgttcgtattccaacttctctttaatatgtttttcagataatggattcatagctgactcccttctagaagatgtcatgaaagccttggaccttgtttcagatcccgagtagtgagtgcaactggaagtgttattttgatctatcaaaaaaagattctatcaagttgaaacattatatacatttttacgctatatataacaaaacaataaaaatgtatggaaaaagacctaatccaatctgaggacagaagttaatctgcctgtattatacatactgttgcttcttgactctatgttgggttgtcttgctttttaaaataagtctttcactataatttgaattttttctatctaaaaagactttggttttgaggctttctatatttatatatatatcaattgaaaatagtgacattgcctttgcctcagatcacaatctaatggccttcctcagaccctctgaatcctttgcatggagcaggcagatgataccagaagataccaaggctatggtagtcatgctctagcatctcctagagcagaggccacatgtcactgaacctggctagagacctcacacagatgtaactttcataagacatattttaaaagttttacccctgaacacatcgctcaagttccatttctaataaacaaaaacccttgaactcacttagtccaaacaagtagaggaagggagaaacagacagatacccgccgagctctgggaccttcccaggaagggaatccttaaacccttttgtctggctcctgttccagtccttctcagctgtctgttggtaaagagcctgagccacagactcccctgagcaagttgatcagccacaatgcctcataacccccaaatatggctctctgcttgttacatagtgggctaagtttaacttggcatttagagtttgaaatagcactgggggaaaacctctacatagacagaccgttgatggtttcaccctttgaacttcactctccttttccctgcctcctagagctgctcactctcgacactctccaccagcctccattacacctgattggcaggagctggaccacaagggcaatggcactcactgcagtttcctagactcaagcttttatgtctgtgtccttcaagttaggttgtccacagatgttaagcatctgtctcatctagttcttaacgtaacattctgaaaggcatgctcttcttatctgatttaccattgcctcttggcttgctctaactcctggagcctaaaatagtttttttgagaagtaaatgctctatttgattgttgaatttagtacttaggaagcaaagagactctgtctttgggaggttgtaccctgagtttataaaccttggtttttaaattattttacctaataaggaacaatattctaaagtcatcgtcataatttaaattttaaatagtaacagattactctgatttaaaaatagccaaattttggcaaattaagtgtcattcctgtgtatttgtcattaaagttctaaaaagaacagctcttaggattttggcatccaaaagtgtagcaccagaaatttaatcatgaaagagcaaaatagttttgtggtgttttgtcttttttggtattcactgtttttctctttctttttttctccctatagtataaatctcatgaagaataaattagatccagaaggactaggaatcatattgttgggtccatttcttcaagaattttttcctgatcaggtaacatattccacagaatatattgactcatttgttctgttgagatgatcatctgtgaacaagattgttttcccctaaagtgtagatatgagactaagaaaaagatctattatataaaggcctttccatgcagaggttaggaagataggagcccatatgctgtgtagtgctcagaaaacacacgtgtctgtacactgatatagtgcctggggtgaggtgggtgtctcagtggtgccaacacattgatacagttctcagagggcaactttgtattctattacagtgctgcggtgctctgatgtgtaagtactggtacagtgatagagtgtatgtcagcacagtggtacaacgcacaaagtgattctgcaagtgtgcacgtgcgtgtgtgtgtgtgtgtgtgtgtgtgtgtgtgtgtgtatgtgtgtattagtgtatgtgtggtgtgtgtgtgtgtgtgtgtgttagcaacttacccccctcatctcatcgggtatatgctgtatatggatctgtgtcctggtacaattgtatagacctcagagtatgtatgtcagtacagtgatacatgtgtggtatgtgtgttcatggagccatacactcctctaatttggaggctttatgtcactacagtgctacaattctctgaggctatcagtgtgccagtacattatttagtactcagaattctgatgggtggcagagaatggtataagactaaaaaagggtcaagccagatgtgcatataatagaaacatcacactgcttcctctgaacctgtgctcacactctcagggcctgccgattagcatgcatcttagaacactgccaaagaagggaagggtaggggcttctagtaatgagcccgagtgctagaagaaaagggtgaacagagtggctttgtttgtagtggagtagcactgactcctctaaggacaagtcttccattgggctttgatgcttcagttatccggctctgttctcacacccttgggttgtgcctgcgttggtggcagactacttctatatcatgcacaggtctttgtctttggtctacatgaaacttgttttaccactgagctagtcagcgtaataatcatggtcacatcatatcagcagtttaaattgttccaatagaaaatgccaattttgtgtaactatgtagttatttaatagtgatgtgcttgctaatttgatatcttgggaacaaatcagactggaccagagtaattggcattggtggcatttggtcttttttagtagagaacataggttcctgttggtgattatgaataatggaagtgagtagtacaattcagaaagcaaccaatactctaacagcataggaaattgagctgttcaaactttggcaaataatttgtggaaaaaaaaagacagaacaaatattttttttctaacattgaacgggtactgttagattataatgttcaatgtattcccattgggctttcctgaaagttcctttttagagtctaaaatacttcagatgtgtcagtggatggtcagttataggataataaaggtttgaagcaatatttgaagctgtggtttttatcccaagaaggctgatgccagggcattattggaaatactgaatactatgttttaagtatgaagcgcatctgtatggggtggggttgaaaactgcttgtgcagagtcagacagttacaggttccttcgaccgcgtgtgtgctcattacataatgatgattaacattaatgacttattagttcaaggaattggtagttttatgttttgtgaatttttttgcatatacatttctttttcttttttctttgataaaatgctttattagatattttctgtatttacatttcaaatgttattccctttcctcatttcccctccgaaaatcctcctatcccatccccaccaccaccaccaccactaacccacccactcctgcttccctgtcctggcattcccatacactgaggaatcgatccttcacaggaccaagggcctctcttcccattgatgtctcacaaggccttcctctgctacatatgtggttggagccttgagtccctccatgtgtactctttgattggtggtttagtcccagggagctctagagttactggttagttcatattgttgttccacttgtggggctgcaaagcccttcagctgcttgggtcctttctctagctctttcattgggggaccctgtgctccgtccaatggatgactgatcatccatttctgtatttctcagttctttgaggatgcacataatgaacgtggtcatttcttccccagggacgtgtgcccttttcgtttgatctagtagcccattgactccagtgagggtaactgcctttgtggcagtgttccttgaggtggtagaagaatgtactagttccctgctactccacaggaaatgtctccccatggactagtgaatcaggagctgcggggacagagcacagcagtgttgcagcacctgcacatgactctaatggatttccaccttagcacattagcacagctgcctacctcacaggagactttcccacttctacctatttccattgtgtgggaactaagacccttgtgtcacacttgccttcccatgtaagcaataccactggtgtcctatctatactcagtgcacgccagcactgtccctcacaccaccagcgtcctgcctaacagatgagtagaagggctgctcagcaagcatgtttgggtagcgaagagtgcataaaggaaatgacagaaacaggttaaaattgcaacgaggaaaagagttaagtcagtcagctttcctaagcacgcttcagctagctacagtgggagggtttgtggtgttaggagagagaacagcagaagcagctgtcttcattgagcatatcctgtatgccttataaatggagtacagttctcccctcagttttggtagtgaagatgagaaaatgtatagaaaggtttgatgtcattcagctggtacctggctgacctgagagtccatcacttctccctcccccagaaggaaaagtgcctgcagcaactacagcctttgtggtgtttccatgtgccacctgattgattagttattccctagagaatacaaatagtactcaaggaaggaaaatgtttaatttataagttaaaataaattgtcaaaatgaagaaccaagtcactgtcatctaagtaatgacagtgatcatgagtacaattaaggaaacagtcacctacatgatgaaagcttagattttagctgggaagtgttaaagcgaatgtaaaatgtaaagtcttccagaataacagcccaatgatgtaaagtcactattctcaaactaattgagaaagctttgacttacagcttccagaggagtaagatgaccagcttgtatgttcaggaaaaaaaacaaaaaactttacaggaaagatgtgggatgggtcttagaaaatgcagaaggggcattttagaaaggaatgtgtcattcttgtttgaagcggaactcaaaagctgctcccagagcctgaagcctagaggaagccctaacccttcccagagctctccaccttcctcactctctcagcaaagctgcatccttttaacccatcttttgctcggtgctaaagcaagagttgccagcagctcacttcccaccaagtagaaaagctctctggagggcctgtggcccagctgggttcatataaaatctttcttacgtcaggaatggccagggagacaggctggagagcaggaaatggtctacaggaaatcagccgagggccaggcactttgggtgggaataaagtcttgttaagcatgatatgttttgatttctgtgaaatggtattgtttaatgagaacttgtgattcactattgtgggctgaattgaagctgttggtgaatgtggatttgtggtttaaatagaggtggtgttgcttggttctccagtgaggagcaaatgttttgcaggatgcattttaggagatacttgttaggcacttgtccttttttaatgtaatgcacacatctacttaagggacgagccagtgcaaaggagctcatgctgggcagggagggcttccctgtccagtggcaacttccctctctcaacccttctggcagctaactctatacacgctgtctttatcaagtgagttcccaatcacaataaagattaatagattttcatctttatatctgttgctcattagaaattgcttgataaaaagatataacttaaagttttaatagtcctttatttataatagggctccagtggtccagaatcttttactgtctaccactacaatggattgaagcagtcaaattataatgaaaaggtatgagaattcacatagtagtttgtcttcagctgggttgatgaactaagtgggcatgactgtgtctgagtcccctgcatttgaaacttcaggatgacgttccaggagactccctgctgcagcacatgtgtaagagctggctgtattcagtttgactaagctgtaacctgccttcaagctctgcatggatctatggagcatttatttcactgtgacaaaataactatatgtttactctgtacacactgttactctggactgtggctttacttccaagtcagcagttctcggtaatccaaagaaggttgttattcatccatttaaatgcagaagtaaataacgctgacttgttttgatgctgcttttgttttatttaccaaatggctgtagtgggcgtttacctagtctttagttgcacaccactgtctgaggtcagtgttgtctgtatgtggctctttgcagagaggactcaacacagggaagcagctgtccagggccaggagagggcagagctgggaccgaggctgtcaaatgttccgagcctgtggttttcctcactttgctccgctcctctcctttctaagtcttggacgaaggcacatggatgcctgcgtctggctgtaccagcctgcctgtctgagcacttccctcttttgaatgaaatgccagtttttgtgttctagtggcaagtctgttgtgtttacatttattctggaaaaagccacagtcttttattaggagttaggccttttcaatttgatctcatgctgtttggaggatggcaacagaaactacatcataatgtaaattacatacttcactaaaaccaaactaaaaggctaaattttacttttattttcataacaaaatataaaccaaaacctttcatattcccaaaaatcatttcctgagtttattgacatctgtaatattgtacaatcagtaagagcccctgggtgctgtttcttattgtgtattaatgaatgctcgcctagttgttgaagtttgcctagcttcgtcatcacgaaatattaattcactgccacaatccctgcaaggtagtcaaatattatccatattttacagatgaggcctctgagacagggagattaagtgactcacccagagtcacacagcaagtcattgacagagcagggattggaactgagttcctgattcccaatcctgtccttggtcttcttggccacgctgcctgtatatagtaagtcttcaaatcatgcttgtgacaagcatctgacatactaacacaagatcagaaattaagatatatggaaaattaacatgacatactatgtaacaaccataaaagcaacgcatgcatctcatttatacaaaagtataaggtcctgaagttatgcaggggctagaaacaggcctgagtgctcagtcaagtcccactcaagatagcaggctaaacaaaacaaacaaacaaacaaaccaagaggggtctgctagtccaggctgcagccaccaggccaggcagcagccactgtggaaagcacagactagatcccactgctttgcagaggggttcctgctctgatacagtgagcaactggggaaccaggcccagtcctgacttatatccctttagacaactctttagaaagtagcacttttgttctgaggttgaaaactcttgagttgtaatttaaatatgaaattgtatttcaccgtaatgcctttggacttccctaaaaaaagccaaattttgtgacctagtagtgtagcattctttgcctaggcagctgtgtttttaagggaactcttgctgaaggctgataagcttgtttcttttggctccttggtcgcatagcttatggctttcatgttaaaacagaattgcaatcatgtgtatcagacactgagtgggtaaaaatagctacacatactctggaaaagggcagttcatagccacccctttcaattacatatttaatataaaattaacataacttgaattcttgatagtgagttagggttctactggtatgtcaaataatttcaagtattttctttgaaaaaaaataagcaaaataatgttttctggtatcttcccaacaaattatatcaaatatgattatttccacaggttagtttactctgtcatccttccatgactcttgtgtctgtcctcacatctttgtgatttttttttcttccatgattgtcatacaatgtaaaatacactcaagaactgcatttcaaaaaccattcattccagagacagcagattccattagcatgcatgcacgtcatctttcaatctgaagtgcacagaagtgcaagtcagagggcatagcaactctctgttgagtagcaggagcaactgattgccttggtagcccagccagaggaaacacagcatgccatgtggacagcaggggaagacatgccctggtgtctatcatttgaagaatgatttgtcatctaaaagtgtatgcttatgattcacctattttttttttgtcttgatctggaattatcagttttaccagttaactaacaattaaaatgtatgttaccatctcattcacaagtttgttttgcagttgctctagttgggtataattcctacgaaaagagttagatgtgaagctctacgtaacttgcttttagaaatgcacttgcctgtgacgttgtctgtagctacggagaactggctacgaacattaactgacctcctggcttttcctctcggcaggtaatgtatgtggaagggactgcagtggttatgggttttgaagaccccatgctacagacagacgacactcctattaaacgctgtctgcaaaccaaatggccatacattgagttactgtggaccacagaccgctgtccttcgctcaactgagttgcctgagtatttgtaaggaagattgtcaaaccaggtgttgaaagggggattcatgactggctacataaagctaaacactggtattgttaattaactataaataacaattaaaaacacatttttcagtgtttaagatacgtttaaattatttgttctaaagctttatgttaaaggttatcctattttactcctttctgtgaaatttactaacaaaattaagctttaattaaagttcatcgcttctgcagtcagggaactggttgttaccagattataaacacaatattatagcatttttataaatggaatcagtcacaaaaacctgcctggaatatcacttcattcatttcattttactgtattattttagcagcctccatatcaaaatgcagaagtcaatttttgttaattttgtttttcatcagaaatactaataaatcacaaattatagaccctggctatttggtaactaatttaactatagcatgtttaccaaaaaagaaaataaaataaaaatttttttaaaaaggctactatgtgggaacttctatttgttcacaggtgcacaggaatgtggtttttacaacgataggggaagaatctgtttgctttgtgggcttactattctcactttcactgtattgctaagtacactctcctgcaagccagctttcttgtatatttataagtgtggtaatgcatgagaatctctactgttacattagcatattgcattatttattatggccccagctaataccgtaaataaagacttttc

SEQ ID NO: 394 - DNA, 2275 bp, Mus Musculus
aggcggtctgtgccggcagtgtgctgccctcacccatctcgacctcccgttcgcgtccgaccgctgccgtcccgctgcccttttctcgagcctccccttccctatgttccgggaccggagtccgagaagcaaagacccacttcttgtccagttcccatcatgtccgaagtgaccaaagagctgctggagctggtgtggggcaccaagagcagtcccggactgtcggacaccatcttctgccgctggacgcaagggtttgtgtttagtgaatcagagggatctgcattagagcagtttgaaggtggcccctgtgctgttattgcacctgtccaggcgtttcttttgaagaagcttctgttctcctccgagaagtcgtcctggcgggattgctcagaggaagagcagaaggagctcctttgtcacaccttgtgtgatattgtagagagtgcttatgacagctctggatcatactgcttggtttcatggttgagaggaaggacccccgaggaagcggctaggatttctgggagtcctgcacagtctagttgccaagtggaacattcttctgccttggctgtcgaagagcttggctttgagcgatttcatgcattaattcaaaaaagatcattcagaactgtatcagaattaaaagatgctgtcttggaccagtattcaatgtggggaaacaaatttggagtcttgctttttctctattctgtattactgacaaagggcattgaaaacataaagaattcaattgaagatgcaaatgagcctttgatagaccctgtgtacgggcatggcagccaaagcttaattaacctcctactgacggggcatgcagtatctaatgtatgggatggtgatagagagtgctcaggaatgcaacttctcggtatccatgaacaagcagctgtaggattcttaacactaatggaagctttacgatattgtaaggttggttcttacttgaaatctccaaaattccctatttggattgttggcagcgaaactcacctcaccgtattttttgccaaggatatggctttagttgcccctgaagcgccttcggaacaagccagaagagttttccaaacctatgatccggaagataatggattcatagctgactcccttctagaagatgtcatgaaagccttggaccttgtttcagatcccgagtatataaatctcatgaagaataaattagatccagaaggactaggaatcatattgttgggtccatttcttcaagaattttttcctgatcagggctccagtggtccagaatcttttactgtctaccactacaatggattgaagcagtcaaattataatgaaaaggtaatgtatgtggaagggactgcagtggttatgggttttgaagaccccatgctacagacagacgacactcctattaaacgctgtctgcaaaccaaatggccatacattgagttactgtggaccacagaccgctgtccttcgctcaactgagttgcctgagtatttgtaaggaagattgtcaaaccaggtgttgaaagggggattcatgactggctacataaagctaaacactggtattgttaattaactataaataacaattaaaaacacatttttcagtgtttaagatacgtttaaattatttgttctaaagctttatgttaaaggttatcctattttactcctttctgtgaaatttactaacaaaattaagctttaattaaagttcatcgcttctgcagtcagggaactggttgttaccagattataaacacaatattatagcatttttataaatggaatcagtcacaaaaacctgcctggaatatcacttcattcatttcattttactgtattattttagcagcctccatatcaaaatgcagaagtcaatttttgttaattttgtttttcatcagaaatactaataaatcacaaattatagaccctggctatttggtaactaatttaactatagcatgtttaccaaaaaagaaaataaaataaaaatttttttaaaaaggctactatgtgggaacttctatttgttcacaggtgcacaggaatgtggtttttacaacgataggggaagaatctgtttgctttgtgggcttactattctcactttcactgtattgctaagtacactctcctgcaagccagctttcttgtatatttataagtgtggtaatgcatgagaatctctactgttacattagcatattgcattatttattatggccccagctaataccgtaaataaagacttttc

SEQ ID NO: 395 - protein, 444 aa, Mus Musculus
MSEVTKELLELVWGTKSSPGLSDTIFCRWTQGFVFSESEGSALEQFEGGPCAVIAPVQAFLLKKLLFSSEKSSWRDCSEEEQKELLCHTLCDIVESAYDSSGSYCLVSWLRGRTPEEAARISGSPAQSSCQVEHSSALAVEELGFERFHALIQKRSFRTVSELKDAVLDQYSMWGNKFGVLLFLYSVLLTKGIENIKNSIEDANEPLIDPVYGHGSQSLINLLLTGHAVSNVWDGDRECSGMQLLGIHEQAAVGFLTLMEALRYCKVGSYLKSPKFPIWIVGSETHLTVFFAKDMALVAPEAPSEQARRVFQTYDPEDNGFIADSLLEDVMKALDLVSDPEYINLMKNKLDPEGLGIILLGPFLQEFFPDQGSSGPESFTVYHYNGLKQSNYNEKVMYVEGTAVVMGFEDPMLQTDDTPIKRCLQTKWPYIELLWTTDRCPSLN

SEQ ID NO: 396 - DNA, 28073 bp, Mus Musculus
  misc_feature (1)...(28073): n = A,T,C or G
cggggcgggccgcggcagcgggggtgtttcccggcgagcgctgagttccgggcgcgcgaagaccgttgggtgaggcggcgcggatctaagcggggggtctactctcagcggcggccgggctggggtcaggcgcggggtgggagtggcggttgggggtcagatgcggggccgccgctgtctgggtgaggtgggtgggtagacttttcggagccgcggagccggaaactgaaagtcgcgggaggggggccggaaaagttcgcgacgtccgcagcggtgcttggctgcgcgcctaccgcggtggctcggggttacagcagtacggtccctgccccagatctcggtccggcatcgcgcccgagggacccacgagccccacttgcccttactggccttgagcgaatacctggtctcccaggccacttttaccgctcacctcccacccacttatgctttttggatggggcagtcaaatttggtctgccaaatttacgtcgccttttctgacacccggctacacaaatcacggacaccacctcccccataaggcctcttccctgttggtggtttaccttccctgtcctcctttattttttcagatctcacctttctgcccctcagaacctctgtttctctggaaactatcttgctttttgtaaagtagtctggcctcgaactactgagtgctgggattaaagggcctgcgccaccaccgccctggaaactatgttgatgggatagatgcatatgtgtcagggtgtggagactgatcccagggcccttaacctcctgacgcctgcctaatggaggttggacctagtgtatattccacatgatggacttgaagccctgagtaggtggaaaggacatgagattgattagaactcacagacgtactcccagcgggccccaaaatcggagaaacaaactttcagctccgtggacacaatgcaatgtcatcattgtcttgtgtgcaactcactagcttggctaccagtcccccagagaagtcacagttgaccttgccaccacggccccttcctgcctgcgtaactgactgagaaaggtggtatttagtgacccaaagttaactgttatcaggtggagaccccaagcaatctcaaattgatgtttaagtcttaaaaattaactttattgctgaatacttaatgatggatttataaatacttgagttttaaaagctgaaggaagggttgttttttatcaagccttgtgtgtacatctggaaggctgagtgctgtcagcagttgtgtctctggtctgaactggtggctccttgcctgcctagcaggtctgtgaggtgtttacctgttggctgtttttttccctgggaccctctagtccgtacctaaactgactattctctgacaatacaggctgcctggaaccctgttactcttctcctgtttgccagtcaccatgggctcctcaggagattctccactatgtccacacacctgagcaagggccatgtgcattcataacctagtctcactggctcctgggctgcagcacactgagcacttccagtcagagctctctgggaatccctgctgtggttcctcctgcacccatgaagtagcagcaggctggacagcacagaggacatggcagcagccaacttggagaaaaccttcttccaagaaggagatgcttcctgcctctcctctcactactgttttctgagagttggtttggggtttccttcttgacagtggggtgtcaggcctccacttcccatgtggttgctacatggattgtcagtgtagcttggcaggtgggtttcatggggtgggagcttttacaggcatggacaggatgacctggagaagaaagaaaaatctagaaagagttgtccatagatcctccagattatgccaaggatgggctgtgcggcttccaggcttatgctgaacatctgtccctgtgtactggccttgccccctttacatagagggttggagacagcttggatgccacactggacatccatctcataattgtagtgtgctcgccctgttcatgtccatagaggaggagacacggtggctgctgcatctaggatctgggacccaggtgggcagtggagttagtatttggggcaggttgtaattttggtggatggttcagctaaagaaagtcaaggatttggaacctggacatagtcttagggttgccgtgctcaattagagcacagggcatgggttgtgagaggaggtgagtttgtgacaggctggacagttgtgttgcacaaacagattctgtgctgtgtacctactatcactttatggcattaccagctgggccatctagttattgatgtggctgcagccgtcagtaaaggatccaggaggggagagctatagaagctggcattcctccttcctctctctagctctgcactccttgtcttctgacggccagtacctgggcttatgttgggcatggtacaaacctgtaagaactgatgggaaccagggatagggaagacaggtggagttgggcagctgtagctttaatgaccagagctgggaagccattgaggttctgagctgagtaggcccagacttcatgctgtgataaaggtccctctgactcaggagaccacagtagcagcaaagaagctatgcagtcagagctggagctgtccgttcattatgtttgagtgttgaggttctaacagagccctggtgctacacacaaacacacacacacacacacacacacacacacacacagagggagagggagagattccaaatctgttattgctaggcatgtgagattgaagcagaagagattgctaaggggcatatctgggaggatagacatggagtttaaagccctactgtgtgttgtggcctttttcttttttttatttatttattttcattttatgtatatgagtacactgtagctgtacagatggttgtgagccttcatgtggttgttgggaattgaatttttaggacctctgctcactcaggtcaattctactcgctcagtccctgctcactccagcccaaagatttattttattatttttgtttttttgttttttttggctaaggactgctttattggtggcagttaatagacatcaataaatattaatccccaaagaagagctcagttactcatcaggttcctggttcatcgagcattgatgaaactgaaccatgtgaagactgggatgacgatgtcagttctgcttcttgggaaatgcagccgtagctaacagatagatggcataggctgtgccaccaactaactgtcagagccactgtggctctgtagaggagggcatcagatggactggcatcccattgtcctcctgaaacagcttttgtttctctggaacttagttttcacaatgccttcgtgaagtggtgctgatggtcctctgggcaatctgacgaacggccagcagactccacaacatcttggcccggttgttgccaccaaccgcgactactgaacgccaaaaatcctatttttttattattatacataagtacactgtagctgtcttcagacaccccagaaagagggcatcagatctcattagttgtgagccaccctgtggttgctgggatttgaactcgggaccttcagaagagcagtcagtgctcttacccactgagccatcttgccagccctgtggcctttttaaaattaaggtttactgaaagttattttttatattttgtgtttgtttgcatgatcaccgcatgagtgcagtgtctgtagaggctacatgagggcattgggttcccctgaaactggagttaaataggtggattgttacctaccattgtgagtgctgggaaccaaatcctggtcatctggaagagcagggagcactcttagctgctgagccatctctccagccctacattttctgttaattaaattaatttgctctttgacagttgtgtatataaatgccttccgattactggtgcccaccccccacaggtcagtgttccatataaaacctaccctgcattcaagtcttgctagagttcttttgtgccagctggaggctttggcatagggtctcactgagctgctccggacacctgtaagctccttggctctagcgaatttcatctcacaaagcagatataaatgtgatgccaccacagagaaagggacagagtcaggtctgccctcctaaccagggctagtcaccctcttgggtgcttagagcagatgtaagttatagatattctctgtgagctaggatacaggattatgattgtctgtggggatgtgccagctgtgtcctgcaggtgacagacaatacagacttgtcttggtgctgtcaccactgtgcaggtccccttcgggaatctcagccttagacagggatgagtgcctttgtaaagggtacctccatgagtgtgtaggggtcactgtgctgctgttgagtggttcccaggggtggacagggagagaggacaagccgttcatggtgcagaagtcgtgtgtacttgtcttagatctcaaggctttctgcttgtgctcgccagtaagttcccccattttcggggaacagatgaattttcttctttgagacacacagaacagtttcatgtgagctctgcaggctgctgggctctgttcaggttaggactctggcttctggactcaccctcagccaaaggttggttcatagaaaccagcacgaaaggcagaaacaagacactagttctgagcctcatgaaaaacatgtggtgaatgaaaagaaggtggcaggtgacagctgtccccagtgctttgtgaatggtgtgggattgttttaatatgtgtcatcagaatcaaagtacgcttgaaggagtagtgagctacttgtaagagttggctttatgatgagcatcgctttgaaaggccatgctgctgtttattcagtcatggcctgttggtgcttgggtctctgagcacctgagaaggagggcctagggctggagtgtttgagagcacaaggaagcagcggggtcaaggtcaggcgtcagggcacagtcagtgtagcagttgtgtagttggtgttgttctgagtgtggctcgacgctgtgggcagtgatgtttaggtgtgcagaacagagggcagggtgtccgtcagaggaggcaggattgcaagggttgggcacagagcagactcagaacctgtgggcttgataggtccctagggtgtggggaattgcaggctggtatccagttgagctgaggtctgaaccccgatggtcataattcacctacatgacatggtaggcgttccctcatgctcctgggactctagcccctgcctaaggtaccacctcccacagccccacaagagaagcatggtcagtagtcacataagcaatggcccaagcttctgaccttcaggctaaactcctccccagttacctagcaacagtgaagaccattaaaagggctgttcagcccccaccttgctctcttacctattcctttgtccttttacctctcacttctctctcctcttccctttctgtcttcttctttcctctactctcttttttttctctctctagccttctctgtctgtctgtctgtctcccccccccctttttctaccttctctctttctccatgcatttctataataaagctcttaaaccatagagagtctctgctccatcaagacccactgcgcactctggtcagtgttgggaacttcttcccctattccctctctcctacaaccctggggctttagcaaggtagctccagggtccccggtcaggggctgccccttttccatcccatgttgcatgggtcaggcatgctcacctggggccaagtggaaaagtgtcccgcagctctgcctgcatctacctgcccagagcacaggaactctggccggacgttaggccccttttcctccccacttttccccagggaccccctttatttttgttcccaacactagggcagggaggagggaggtccagccttggctgacttgccagtcactcatttttgcaggccagtagacctagagccaagtgactcactgtggcagcagacccacagtctgatttcccacaccgtagctttccaccagtggtttgctggacaaggccttgttcatgtcaggatgtgaatgccccaaggctttgagggacatgaagacagcagggcagcaggtcagtggggccaacaaggtttgaaggacagcaagaccctgtccagcagttgtacaggcgtgaggtggccatcgctgctgttgtcctagagccgggtgattgcctctggcactaagtgtgggaatgattctggaaggtgattcattaactgaatgaaatgtgactggggttttgctgggaagaggactctgggctgctgctgctcatgacctccctgccttcagcacacctcagataccagacactttacaatctatatctcaggacatataacccacctcttccttaagctcagctgagactgaacccctacttcagagctaagaccttgggaggtcgtggccatcctcccaacccacatccccagatgcctccttgtctcatagggactagcctgctcttttgtgagaaccagctgtattcccacacccttcaaaggctctaaggaaccctggttggcagaaaggatggttagcagctgcccccagcctttacactgtcttggagatggaaatacagcaaggaggtcgtcactgggaaatggtggtccccagatgtgagaagctattggaagacttagtgtaccatgttgctaccttaggtagtccaggacacttgcctcagcccgagtagacttcttcccagagagctacctgagaaaatgggtgagaggaaagcccacttgctgtgtaattactcggagctgagagggagcctagtagaggctgctgtgctagaggataagggaggaacgtggcattgaagagccaaagtggatagaaaaggaaagcgcgatggaccaggctgaggtggctcttctggcatggcgggggatgtttaaaggatgtaggaagaatgggctccagttggctttgagcaaagtgtcttggagaagatgacaagtgctagatctagtctgccgggaagaggggcttgcaggctgtgtgtgtggagaactgatgccgaagaggaagcacagtggtcagtgtcttggtctggttgtgtcttgtgtccaggtaaggccaccaccagggtgttgtctaggacctgccctgctggcctgtggtaagcttcagtcgccgtctccatgtttactgtagagacgtgagtgtggggtggaagacgctgactgttagtgtcagcgggaagtacttgctccagccaggattggtaccagcaggtaggaagctcattaattagttattgtgggagccaccagatctgtcaccctgattgacatctcttcccacatttgtagcaggggatttaattgccttatctcagaagctttccagaactttaaaatcctgtttttagatccttttacaaggtcagtgtagtataatgacccaggtacctcaccaggttgcctcctggtagattcctctcctctctttctccctctagagcagtggttctcaacctgtgggtcaagacccttttggagggtgaaacaatactttcacaggggttgcccaagaccatcagaaaataagtatttacattacacaacagcagcaaaactacagttaggaagtagcaatgaaaataattgtgtggttggaggtcaccacagcataagggacagtaagaaaggttgagaacactgctctagaggattgttctgaattgaggtgtgatatggtctgtgtttttttttagggctttgtggtgtgtgggggttgtaactcacatggctgcagccagtgtgacttcccctggctccctagaactgctacagcctggcttctccaagaccctcctggggaccaggttagaagccaagtacctctgttcagcctgcaaaaacatcctgcggaggcctttccaggcccagtgtgggcaccgctactgctccttctgcctgaccagcatcctcaggtgtgcatccattctctccaggtgggtggggcagctgggtggctctgaagtcagattgcacactgtcctgtagagtggatgccagtacaaattcttcatggattctggaggcttagctcaaatcaagaatgtaaaatttattgggctggagagatgcctcagcggttaggaacactgactccagaggttctgagttcaattcccagcaattacatggtggcttacaaccatctgtaaagtgatcagatgccttcttctggtgtgtctgaagacagctacagtgtacttatatacgtaaaataaataaattattctttttaaaaaatataaaaaacattgattgtttctgggtgaggtgaaacatcccttaatttcagcactcaggaagcggaagcaggagacctctgagttcaaggtcatcctggcctacaactgagttctagggctacctaaaaaaagaaagaatggagaactgatcatagcaatgtatggtagtatattcccccccccccccccccccgtgtgtgtgtctggtgtctctgtctctgtctctctctaaatttttgttcccaactcttgggaggtagagactggaagatcagaagttcaggtcatccttggctatgtagaaagttcaaaaccaacctcagctctgtctcaaaaaataagacatcagagaactggctcagtgcatgaaagcacttgctgcaggtttgacaggctgagtgtgagccctgtgatccacacttaatgaaggagagagctgacttgtcctctgacctccatcagcacaccttggtacatgtttatacacacacagtaaattttaaaaatgtaactaaaaaattaaagaggcagggtagataaagtgcttcctatgaaatcaaggcttgagtttggtcctctccacccatgtaaaaacctggcatggaaatatgcacttgaaatcacatcaaatgcctggacatagagtcaggaggggtcttggggctcattgtttagcctaatctgcatgttgtaggtcccggtaagagttctatctgaaaaaggtagatggcacctaaggagcagtacctgatatgtgaccttgagctttctcagatacatgtatatgcacccatattcattttctcccccccccacacacacacattggctatatattggaacactatttttggacatgtagattaaatattgcatgttggtttcacaggcactagaaagctagtgtgaggattatagctcccttaggctgctctgggtgggtagattgaatgtcacacgagtgggtggctgacatgtgtcactgctatagtctgaaagggcagcagcagtgcacatggagaaataaacacacccacatttttctaccatgtagtttggaggccagggcctacagtcaaggctcagtgacaaagcacttacctggcattcatgaagctttagctagatccctgacatcacaaattcaaaaagaaaaaggaggagatggttagccttacaagttcaggccccgatacccttttctatattgaagcttctcatttgtgggttttcatgatattgtacagttgatatactagtttgttcaaagatgagaaaaacaaagaatgaacagtgtggagccgggttgtgggctgagcaggcagtgctcagagattctccagagcgggcatttgagcggactttgtgtttcctgtgttcccaccagctctgggccccagaactgtgctgcctgtgtctatgaaggcctgtatgaagaaggcatttctattttagagagtagttcggtaagtactcagtgctgagagaaacatgtcaaaatgaacagaaatgtttagcaagcggttttgttctgtaacactggtaacggaatgaggatttgggcgttgagagtggcctcttcatgacctttagggttggaaaggctaagtgtgggccggctggtccttagttaccttctgccccacgtgcttgctgaaaagggtggctcagctagttttgggtagggtctctgatctagacgttgcttcatcgacagtagggtactgggagagggtgtaacccaaggacattcctgttccaggcctttccagataacgctgcccgcagagaggtggagagcctgccagctgtctgtcccaatgatggatgcacttggaaggggaccttgaaagaatacgaggtagatggacatttctgttctggcccggtggctgagtctccagcagtggactttaaaaaataatttatttctatgcatgtgtggtttgcttgcatgtatgtctgtgcaagtgtattggacccttggaactgaaataatggacagctgtgagctgcctaccgagaattgagctgggtcctctgaagagcagtcagtgctcctaacttttttttctttcttttttttttttaagatttatttatttattttatataagcacactgtcgctgtcttcagacactccagaagagagcatccagtcccattacagatggttgtgagccaccatgtggttgctgggaattgaactcaggccctctggaagagcagatggtactcttaaccgctgagccatctctccagctcccatgcttttgagtcatctcttcaacccctacaaaacatttctcatagaagccgtgttctagttttgctagaactggcctggctaatgtatgtgaaaaaagttcctcctcagagctggccatggtggcacactcctttaatgccagtactcgggaggcagaggcaggtagatctctgaatttgaggctagcctggtctacagagaacgttccatgacagccatcacttcatagagaaaccctgtctcaaaaaaacagaaaagaaaggaaaagaaggacctttttttctctgagtatgcctgtgaccccagcacttgggaaggtgaggctagagaatgctgagttgagggctagctgggcctacctagcgaattttgtttttgttttattttgtttctttctttgtttaaagagtaccctttttgaaacccaaatagtgcaggtaggcctgtaccataagcctgtcacttctttccacgtcctactccagttccccagaggtacagtaggacgggagtgccttacataagaagctagcgccaggctggccttggtaacaccattgtgttgctttggctgcaaagttttcattgtttgcaggaagctgcagcttttaagctcagtgggagtctgtggtgtatatcatacccaccagggatttctctattgttatttgttttctatttcttttgagtcagtctttttttttttgtttttgttttttgttttgtttttcgagacagggtttctctgtatagctctggctgtcctggagctcactttgtagaccaggctggcctcgaactcagaaatccgcctgcctctgcctcccgagtgctgggattaaaggcgtgcatcaccacactcggtgtgagtcagtctttctatagccctgttgtcctggaattcagagatccacttgcctctgcctcttgagttctgggattaaagatgtgcactaccctgcctcactcacaagagttttcttgctgtgaattgtgttgactctggaagttatttaactaatgggtatatttgttttggtcacagaaagtcatctagaaggccagaggaagaggtggtctatgaaaggggccagtgtagtgtggacattagcatgagcttttttttttttttttttttttttttagtatgtcacctttaggcatcttgagttaaacctgcattacagaggccacgtggttaagtgacactcctctagtctaccaagtttctcattcctcttgttgctttagtcaacaaccttcaaagaagtttttgattccgctggacatggtgatgcacacctataatccctattcttagaaggctgagacaggaggaccatgtgttcagaggtggcccaggctgctagtgaggccttgtctttcctatgcctgcctcttgtgtctggctatatgtcccgtgacctgttgactggtcacactttaggtttcagtctctagctgagcagtttgggcttcacttgggtgaacaagaaactcatttttttcaagcatggtgtcaggacctgatcaagagtcatagtccacactgtatccttaaaatgaaatgcttagtgctgcctgtgaaagagacggctcctagggaagtgacatgcttggtgtattgggtggatgcaggaaaatgtgggtgtagggcatggtggcctatagaacctgtttgctcttgaaggtgttttgagagacccctggggcaagtggaataattcttcccaggcctgtggtaggctttagattcccccaagatttctgttgcttccaggcctgtggtactgtaggtcagtgactgtgtgggcctctgactgatggccaggaactgcagccaggccatgggcttggtgccatgtggctttgtaggcatgcagagtggaaagtccctggctgcaccctttgagagctctggaaagtccctgagatgagttgggtttggtcacatgggagggcaggcacagctcagccttagctgattttattgataaaaacttgtcgctggtggcaaatgtcacaagccagagaagaaattacaccctctttgtgcagtcatcaccacagataatcctctcttctgcctgtcacaaatctctttatttcttagctttcactggaactaaggttgtaactaaaacattttttttatggtttgaattatttaaaatgtttgaaagatgggaaaaaaatcctgcttagcctttggctctgttttcctttatgataatgtctttcattctgaagatgaattgaaagctgtattaaagtctgttgtcctgaaggcaaagcctggtactgcactagggaaagcaaaggctgccagatctctgtgagttccaggccagcctggtccccacatagtgagttccaggccagccaggctacagattccagggaacagctgaaactgggaaggcaggtgtgccagtcggcatggcctcatcgtggacttgcttttcacatttatttattttatgtgtatgggcttttatctgtatatgtatatgtgcatcacttgcatacctggtgcccaaagagggactagaagagggcactggctcccttagaactggacttaaggttggctgtgagccaccatgtgggagctgggagttgaacctgagtctgctgcaagagcaacaagtgcttctaaccactgagctctctctccagcccatcattatagtctacatagtgaattccagaccaggcaaagttatatagtgagaccctttctcaaccacacccatccaccccaccccccaaaatttcagttttaacaactatattttcttaaaatgttaaatttgaattctgcttgaataaatgctgatagatttagattgtgtctgctaggggagtttgagctttgtctttgttgcctgaatgtgttgttacaagtgtgtcttctgtaatcctttatggtcaggacctgaggacaagcattcattccctggtctcccccaggactcatctaaaaaagtcaggtacggcagcatacgcctgtaatctcaaagttggagaagcagagacaggaacatctctggggtttggtggcctgccagcctggagtattgagtgaatattcaagtcactctcaggttctgagtttagctgggatttgaagcagccagtgcagggcatggaacacagggccatgaacacacaaagcacatactcacccactgagcctcacctgtcccaggagagaaacagtttattgaaatttgtcagaatccaggtttcatagaatgaattgcataaggtcctgtctcaaaaaaccagtatgagaaatatagagaaactctgagcagaggactgagagccaagtcagtgctaggctcctggtgcctccagaacttctgtcagctgtctctcagccccgtgttggcctttgtggactacttcaaagcaaatgtaagatgcctcgtcatttttcttgtttattttttagtatagaggattaactcccagggttttgtgcattctaggctttcttctaccgtataacagctttgtatagtgtgtgtgtgtgtgtgtgtgtgtgtgtgtgtgtgtgtgtgtgtctccatgtggctgcgcatgtgtgcatgtgcatttggagaccagaggttaacattgggtgtcatttctcaggagccatccactttactaagatagtttcctattggcctaagctcagcacttagtctaggattcctgaccatcttacctgagggtcctcctacctttgtttacccaacattggaattacaagagcacactgctatatgtgactttttaaaataggaggtttgagggtcaaaactcaggtcttaatgtttgtgtgggatgtactttcatcagctgagccatttccccagccccaagtcataagtagccttttagttaaattatagtaacaactaatttttttcaaatactatttgtttatttaatgtatatgagtacattgtagctgtcttcagacacaccagaagagggcatcagatcccattaaagatggttgtgagccaccatgtggttgctgggaattgaactcaggacctctggagaagcagtcagtgttcctaaccactcagccatctctccagccccaacttaactgtttttgtacattagtcttaccttctgtaaactgttatagcataatagcttgaggccttttttttttttttcctccgagacagggtttctttgtatagcccaggctgtcctggaactcactttgtagaccaggctggcctcaaactcagaaatccgcctgcctctgcctcctgagtgctgggattaaaggcgtgcgccaccatgcctggctgaggcccctctttgtgcttgtttaataactagttgttgcacactcagggagttacaggatcatggcacacagagccccttgggctggagcgttagtgtggttgtctaagcccttatgtgtcctagcttgggggttgccaagcacttagactgaatgcaccacttctgcttttcccgactacagtcccacctccgtcctaggatttgattgagggtctctcaccctgttgtcttcttagagcaaccttcctccagagtcatttggataactctgaacagctgatttgatctttatggctctgctgttgggtcttttctcgcctactctggactgtgtctcagcctcaggaacttgcctcttgcctattaaccttctcctagaagttttcctcctctgtagttcgctctgtgtctctgcttccaaacacacacacacacacacacaaaagaccgtagcaagagagagacaatggtgaaggtttccaggggtggaggagtctgtgcatggagatagagttagcacttaggaagaagggagttctgtggatgagcaatggaggctacaccgtgcttcctgtactgacctgtgtgcttaatgtaggccatcaggcatagatggtacacatctttagtcctagcactcaggaggcaaaggcaggcagatctcagagttcagaaccaacctggtctatagagggagttctagaacagccaggactatatagagaaaccctgtcacacacacccccaatagtatagggaggaaaacaaaaagatagcttagccaacaaattgctaatgccatgttcctctggtcacctgtgtcttagtggtctattgctgtgcagagacactatgacccaggcaactcttataaaggacaacatttaattgggggattgctcttagttgggagctgtctggcttacagttcagaaatttagtccctaattgtcatggtggggaacatggcagcatgcaggcagacatctgtctcttgatccacaggtagcagaagggggctctgttacactgagcatagtttgagcataggagacttcaaagcctgcccccaaagtgacatccttcctccaacaaggccacatctcctaatagtgccactccttactggccaagcattcaaacacataggtttatggggaccatacctattcaaatcaccacagaagctgatatgggggtggggtggggtgtccgggtgtgtatggttgaagagttgggtgtcctgggggtatcattcactagagagcagctgtaatgaagcagctcagtctagcacagctaggagtcagcatccttggtttctgaaagtgagagaggatacagtggcctgtgtctatacagtggttctgaggggtcagtctccatgatgggcaggctggacagcatggacagcaagccacttgcatgtgctgtggccacctgcgtgtctgcgtgctatcttcatttacttcttttgttgccagagctgccacgaaggactttgcccattcctgctgacggagtgtcctgcatgtaaaggcctggtccgcctcagcgagaaggagcaccacactgagcaggaatgccccaaaaggagcctgagctgccagcactgcagagcaccctgtagccacgtggacctggaggtgcgctgggcggggtggggcagggcagggcagcctaggaggcagtgtccacagcatgggcagtcgcctagcatttactgccatggttgaagtttgcttaacttcttcatatttctctccatgtcgtcatggagtttagaaggtttttggtggaactgggtaattagtactgacttactttaaaaagtgatttatagcctggcggtggtggcacacgcctttaatcccagcactcaggtggcagaggcaggcagatttctgagttcaaagccagcctggtctacaaagtaagttccaggacagccagggctatacagagaaaccctgtctcaaaaacaaaaacaaacaaaccaaaaattacttattgctctgtcagaggacctgggttcaggtcacagcacctacaaggtgcctaacaacaatcccatagcaccagttctatgatttatttattatatgtaagtacactgtagctgccctcagacactccagaagagggagtcagatctcgttatggatggttgtgagccaccatgtggttgctgggatttgaactcctgacctttggaagagcagtcgggtgctcttacccactgaaccatctcaccagcccatagcaccagttctatgagagcccttttctctcttctctgtgcaccaggcaaacacatggtttaccaggcaaaacactcatatacacaagataaataaatctagaacatgtatattttgagacaggttctcacctgtagccttccctgaactggaacttgctatgtagaccaggctggcctcagacttaccgagatccttgtgtctctgctctaaaatgctgggattaatgacttctgccaccttacagggctaaaagaattgtcaggtattttagacctgagtgtggtgaattggtgcctataatcacagtcctcaggaggttgaggccagcctgaactggatggtaagaccctgtcatgatcccacctctctccaaatgacaagaaaaatatgtcttattttagaaaagttgaagcacagaaggcagagaaaacagcagctatgtgtcacttctctagactgttaatgagcagatccgattagatcttacaagacaggttctcattcatctatggagttcagggtgcgttattggtagcaatgtgccatcacttgaacaagggtctgagatggtcaccttccatagagaaaaggtgtaccttggctttggactgagagagaggatgggactgtgaggacatgcgcctagtggcctaaggaattttcatatgaccccaccacttagattgcatcacatgcccatgtgtagtcctatgttagggaccaagccttcaacacgtagatctttgggggacactggcaagccagagcatatctaaaatttaacagtgtttgctgtgtccctttcttggcttgcccattctcactgtgagaaggtagccatcactcaggtttgctggagacggggacgtcaacttctctttcttagctgcctgctgaatttgctttccacatcttgggtgttggcactgttcttctgttgtatgatattggatgttgggtgctctatagtggtttatcagggtctctcctcagggaagtttggctgtgcattggggccatgtgaagacaggatagtctagtgctaacattaagtgctgcagtcattttgatctctacatggatcctttgttctagtcaggtgttggaagatggtgttccttggtcccttttgtgtttcctggaggttacagaggaagaagtctttaagtgtgaagttgtgagggtgcctgtaggctctcactcagggttagtcacaactctcaagagagtcagagggaccatgagcatatcaggcttctcctaggtgcaggctgccatcttcactacttcctgtctccctcctcctttacttccctgtcctgatgttggcatccccaactaatgttcctgtttctctttaaggtacactatgaggtctgccccaagtttcccttaacctgtgatggctgtggcaagaagaagatccctcgggagacggtaaagcatttgcttccaggggggtggtttatggccagaagcagcagagtgaggtttctgtgctattgctacgatgggcatgttcttgggcacggtggcttatcctccaatattcatttgacattttttgctgttcatttgttttgaggcaggggtcttactaatagccctgagtgcctagaaactgcactggagaccaggctggccttaaagtcatggagatttgccttaacagcatgtttcaccatgtctgatgttccccaccaccccaccctctaccagaatttcatgtagcccaggctggcctggaacttaatgtataagctaaggataaccttgaactcctgatcctcctgcctccaactgcggagtgctaggattataggcatacacccataatcctggtttatattgttactgttgggcaagttcctttttggggggggcgtgtagtgtggggttgtaattcagggcttcaaagctttctcccattgagctggacttccctcttgatgacagaagtacacctctcaccacaaagaaataagagggtttatttttgagttgagtacaaaagactggcctaaggacatagacttagttaccccaaataatgagtttcttgtgtgtgtgtgtgtctgtctgtcgtaacccttggtaacttcattcttcttaccttccagtttcaggaccatgttagagcatgcagcaaatgccgggttctctgcagattccacaccgttggctgttcagagatggtaagccatggggctgctcttagggactaggaacctgggtgggtctttcccttatgataaacagtctccagctctggttcctcctaggttcttccacctctctgttatctctcctggctatctctcagcaccccttcttgctgccctcaggtgtccaggcttgccctcttgagatctaagaacacacaagtatatgtgctcctggcaccttgcacttcccagaatgcctagtggaggccttagagccacaccttggtcttctgtgttcttgctgtctacttcttcccatctctcccatgaaaggagagcacactttagctcagctgcctagccaaagtccccgagcccagaggtctggcagatcttcctcttgtgtcatatttcacatgcatactgacaaatccttggctgttggcagatggatcctgtccctccaactgctatcttgtcacctcatcatctcttgcctggacacaggctttatgtattagcctatcttgccccttcatattcagcctgtcacaggctatttctttctctgtacagtgggaccccccatgtcctttcatgacgagtgaacatgtgctggtccacagtgggcctataggatgtgaacattcaggggaagaggaggaggcaagctgaggatgccgtgtctggggcagggcgtctctgctctcttatatgtagtggtggggatagttacagcctcgatttcaaggcagctgagttccctgcagaaggtagattagaagctaccaggaaactgagctgctgtaaccttgagcctaggatctgtgcgtgttcagttcgtggggagctccagttcgtctctgaccttgtttgtgggaaccttgctgacccatgctgaggaagccactaagctgactagtgcctgcccaggaggtgcagggtcacctgcttatgtaccctgtcgtccaggaggctgtgcccccactgggaacacagatgtcttgctttctgtttacttacgttttgagtgtctttgtaaaattattttattttgttatgatttttattttttattacatctgtgggtacatgtaagccatggcagcatgcacatgaaaccagaagaagcttttagagctgactctgtccttccaacacatgggtcccgggctgaactcaaagatcaggcttgcggacagcacatctacatgctaagccttccctagtgttgcttgagattgggtttgttggtttttgttgttgtcgttgtttgttctttgttttgctttgtttttaaagatttatttatttattttatgtgagtatactgctgctctttttttttaaagatttatttattattatatctaagtacactgtagctgtcttcagatgcaccagaagagggcatcagatctcattacagatggttgtgagccaccatgtgagccctgagtttgttttttttgttgttttgtttgtttggttttttttttttttttttttttttttttttnnnnnnnnnnnnnnnnnnnnnnnnnnnnnnnnnnnnnnnnnnnnnnnnnnnnnnnnnnnnnnnnnnnnnnnnnnnnnnnnnnnnnnnnnnnnnnnnnnnnnnnnnnnnnnnnnnnnnnnnnnnnnnnnnnnnnnnnnnnnnnnnnnnnnnnnnnnnnnnnnnnnnnnnnnnnnnnnnnnnnnnnnnnnnnnnnnnnnnnnnnnnnnnnnnnnnnnnnnnnnnnnnnnnnnnnnnnnnnnnnnnnnnnnnnnnnnnnnnnnnnnnnnnnnnnnnnnnnnnnnnnnnnnnnnnnnnnnnnnnnnnnnnnnnnnnnnnnnnnnnnnnnnnnnnnnnnnnnnnnnnnnnnnnnnnnntttttttgcacaagcttgaatatgctcaaatagtggcttgcctttaatcccagcacttgggaggcagaggcaggctaatttcttagttcaaggtcatcctggtctacagtgtgagttccaggacagtctggactacacaaagaaaccctgtctcaaaaaaaaaacaaacaaaaaagcaagtttgaaagtacctagttgtgacttaattacttttctgttgctgtgtaaagatttacacagtttcagaaggttagaatctatgtccatcatcatgggcagcacgggagcaggcaggcaggcaggcaggcaggcaggcaggcaggcaggtaggcaggcaggcaggtatggtgctggagcgatagctgagtgctcacatcctgagagagaagcacatgtcctaatggatgtcagtccagtgtggctcatggtgccgcactgttcaggctagttctgtacagacaccatgccaagagctcttgtcctgtcccacaggtggagactgagaacctgcaggatcatgagctgcagcggctacgggaacacctagccctactgctgagctcattcttggaggcccaagcctctccaggaaccttgaaccaggtggggccagagctactccagcggtgccagattttggagcagaagatagcaacctttgagaacattgtctgcgtcttgaaccgtgaagtagagagggtagcagtgactgcagaggcttgtagccggcagcaccggctagaccaggacaagattgaggccctgagtaacaaggtttgtacttagctggagtagtaagtcctggatctttggcacctggacagtgtcaaacccgtctacactgcatgacttgggctttggccatctgctttctgaatcttatactctgtgaggctcagtcagagcatttggtttttggcctaggagggtacagcatcagtcatgacactgtgctggggctgtggagctcccgggtgcatgtacatccagagccgtccacgtgaacttggaacctgttcctaaccctggggacagaaaagactccagaggctggcagtgggggaggagggggctcagggccacatcacatgacggtcagagttaagtggtctctgctctgcaggtgcaacagctggagaggagcatcggcctcaaggacctggccatggctgacctggagcagaaggtctccgagttggaagtatccacctatgatggggtcttcatctggaagatctctgacttcaccagaaagcgtcaggaagccgtagctggccggacaccagctatcttctccccaggtgccatttgtgctcttcccatcagcttcagaggcccaacagaacggctccctagctggggcagggcacatgctcagctggcaccaggagtgtctgcatctaactcctcctgggagttaggcatgaggagctatggggtgccaggttagatgtgcagagtatgccccttgtcacctgcgcagatgagcatggtggctttagagtagataatggaaaacagacctttgcaaaccggtcacagcttcaagcctgcctgactcccgcccagttggattgagcattagtatttcctgtaagcaggagccctgtgagaatgttcctcactctccttcacctgcagggctctggaggggctctggagctcctctggcagggcctgccacgtgctagagactgggtgtgtcattgtaggctatgtatggttgcttcccttgtgctgcctgctttgcacttcttaccgtaccacagtggctacctttctgtggacttcagcgtacccctgaggtccccacagatggtgtgaggggccaggccttgtctttctcccttgttagcctcttcttcctgctcagtagtttgcttcataacttagtcatcgtctagtctatcagaaagtgacctgcacagcatttatttctaggcttcctttacaaaactttctctgcagtagaggttctaggatcaaggctaagcccttaggagaccctctccttactggcttgccttgacactggtggtccctgcccttgggtgggaagatggagcagtctactcatctctgtaacatggcttcagtgagggctagcagtaaacaaacctggagactaggaaaccagtgtcttaggtgggaaccgaaggcacatgtgggcagcctgggagtcagatatgatttctagagttgggtagtccatgttggcactgcctcccacccccataggtgacttagtaaatgttaacttgggaggtgtcccaggttaacagagttccacagtgagtctgctaagggtccagcatcaggagcccaagtcccttgcagcagtctcctggggccatagccaggcaaaagctggtttgtgtaaaggtctgctttaatattgttggtgaatcgggttcatgtagtaggcagaggtacaaggaacaggaaggtgggtattgacactgcctgcagaggcttagctctggtgagtagagcatgggttagtcctgttgtgtggctgagagctgctgggaagccagctgagactgtattgttgggttctccgcccagaggacacagcttttcacagctctctgcttttcacttatggatgcacatcatggcaagcagcctgtggtccagagctgttcacttcccagctaggaagcaaaagaaagggatgcaatgagtggagagcccactgtcttcttcaagtcccactcccgtgactgagacacctcctctcaggccccacattagaaagttcctccatctgcaggcagcgccagatgtttaacaaatgggcatggggtggaacatgcggacctacataccctaaagagtgtagtggcaggtgcctaagggttgttaagggttgtgattactgaggctgaggtccacagtagaccaactttatgtggagatgctggtataaattctggagtccaaatactgaaaagcttgctgtctaacttcatagacaggtcctacctcagggcaaggagaccagtttgattttcttctcttatttgtgttctgagttccattggctgcacctgccccagggtgctgctcccacgcacaaggtctaccacccatgtacagtggcttagaacgtgtcctcaaggcgttcagggatagtgctgctccagccgtaggtattccttgacccagtcagcctcacaaccaactagttacgtagatcatgtatcgtttgttattttttgagacatggttttgttttttgttttttgtttttttttggggggggtggggggcggtttcaagacagggtttctctgtgtagccttggctatcctggaactcactatgtagaccaggctggcctggaactcagaaatccgcctgcctctgcctcccgagtgctgggacatggtttcacactatagcccatggtggactccgatccattatgtagcccaggctgaacctgaactcatgttgggaagcttgtgttactacgtccaagtctcctcttacgcagccttcccatgtccgggctgttgtttgttacctgtgaaccagtgcttctcaacctcccaatgctgcacctcttcactacaggccatcatgctgtgctgaccccaaccatacaatgattttgttgctacttcataactgtagttttactactgttatagatcataatgtacatatctgatacgtgctttcctaaggggtcacaagccacaggttgagagccgctgctctagggcctgaggaaggttgactgtgctgttctaagtttctgtttctcggatgcttctgctgaggcagggttcctgtggcctggtctcccttcatagcttgttgaggaccctagctactgggtttttgccaccatttttgtcactttgaggttattggaattatcagttagctttaaaggatggacgtagaaagatgcctgactggatttgtaagctcaatctctggaacccacattaaagatggagggagaaaggagttaacagagacaaagtgtggagcagagatgaaggaatgaccatctagagactgtcccacctggggatccatcccctatacaatcactaaacccggacactattgtggatgccaacaagtgcttgctgacaggagcctgatatagctgtctcctgagaggctctgccagcgcctgaaaattatagaagtggatgctcacagccatccattggactgagcacagggtccccaatggaggagctagagaaaggacccaaggagctgaaggggtttgcagccccataggaggaacaacaatatgaattaaccaatacccccagagctcccagggactaaaccaccaaccaaagagtacacatagtgggactcatatgtagcagaggatgctagtcagtcatcaatgggaggagaagcccttggtcctgtgaaggctatgccccagtgtaggggaataccagggccaggaagcaggagtgggtgggttggggagcagggggagggagaagaggataaggggtttttggaggggaaaccaggaaaggtgattacatttgaaatgtaaataaagaaaatatctttaaaaaatagatgttaggagagaccaggcagcaagcagtgcacaggaaggcagaggccagcctggcctaaaagtgttccagaactacatagacaccctgtctcaaaagccaaaacaaaaggctgggaggagaagcagctcccagagctctcctttggtttccacacacaccctggcagggtcggccccgtaggactgcacatgagtgcacacagtaatgactttcctgaagaagtgaagttggaggccatcctgagctgcatggcaagagtctctgggtggagggaggctttctgtctgattgtttgtttgtttttgttttgaaacaggggttctctgtatagccctggctgtcctggaactcactgtgtagaccaggctggcctcgaactcagaaatccgcttgcctctgcctcccgagtgctggggttaaaggcgtgagccaccacgcccggcggaggtttgtttcttttgtgaggaaacccttttcttgatacttagctaaagctgtgtgatggctcctgttttccccttcctgagggtgggctgcagggaaggagctgtgtcctgccctgtcctcactgatgcgtctccatacctccagccttctacacaagcagatatggctacaagatgtgtctacgagtctacttgaatggcgacggcactgggcggggaactcatctgtctctcttcttcgtggtgatgaaaggccccaatgatgctctgttgcagtggccttttaatcagaaggtatagaaggcagccccgggattctaggagatctgtgggtggcgttgggtacagcttccaagtggccaggttctccaagacgctgtatgaatccatgcacatcgggctgtggttctgcagtgattatttctcagtgccgattctgacacctgattggcttcatgacccacacatgtttgaatctcctggggaagtatgcttccaggggaggccacagccagagcccctctgtcagtattcagaaccaggacttccttaattaaggaattgaaactccagagagtagactctactgaacatggtctctttccttcaccgctcagggcccagctctctccttagaagccatacaggaggtagagcaagggatgaggactagcaggcccagagatcctggctatcactgctcagacccctgttcatgtgaagtactttgcttcccaggcaagcttcagaatcagtagacgaacactacaaagaaacagcacatgggagcatgtgtacagcactaagctttagcctcagttcccaggccctgtgagcacccagtaccaccgtgggcatgcgttgtttctggatgagaagctgaatagacgggccagctgtctaggcacactgctgagggagaggcaggacaggatggctgtgggcttcaggtgactcatgagcatgttccctccctggattgacttctcgcaggtaacattgatgttgctggaccataacaaccgggagcatgtgatcgacgcattcaggcccgatgtaacctcgtcctccttccagaggcctgtcagtgacatgaacatcgccagtggctgccccctcttctgccctgtgtccaagatggaggccaagaattcctatgtgcgggatgatgcgatcttcatcaaagctattgtggacctaacaggactctagccacccctgctaagaatagcagctcagtgaggagctgtcacattaggccagccaggccctgccacacacgggtgggcaggcttggtgtaaatgctggggagggcctcagcctagagccaatcaccatcacacagaaaggcaggaagaagcctccagttggccttcagctggcaaactgagttggacggtccactgagctcaagggcctggtggagcccgctggggagcttctcagctttccaataggaaagctcctgctgtctcctctgtctggggaagggagagacctgtaggtgggtgctcagaaagggcctctccagagagagtctcaagagctgcagcaggagcaaagtgactggccttccccaccccatcctttggaaaagaggtagcggctacacaggagaaggcatgcgcctgcagggtgtagcccaagagagaagctctctgagacataggccctcactggagaagggcctgcctgggctgcacagccttgccaggtggcctgtatgggggagaagtgattaaatgttgagatgtct

SEQ ID NO: 397 - DNA, 2151 bp, Mus Musculus
cggggcgggccgcggcagcgggggtgtttcccggcgagcgctgagttccgggcgcgcgaagaccgttggggctttgtggtgtgtgggggttgtaactcacatggctgcagccagtgtgacttcccctggctccctagaactgctacagcctggcttctccaagaccctcctggggaccaggttagaagccaagtacctctgttcagcctgcaaaaacatcctgcggaggcctttccaggcccagtgtgggcaccgctactgctccttctgcctgaccagcatcctcagctctgggccccagaactgtgctgcctgtgtctatgaaggcctgtatgaagaaggcatttctattttagagagtagttcggcctttccagataacgctgcccgcagagaggtggagagcctgccagctgtctgtcccaatgatggatgcacttggaaggggaccttgaaagaatacgagagctgccacgaaggactttgcccattcctgctgacggagtgtcctgcatgtaaaggcctggtccgcctcagcgagaaggagcaccacactgagcaggaatgccccaaaaggagcctgagctgccagcactgcagagcaccctgtagccacgtggacctggaggtacactatgaggtctgccccaagtttcccttaacctgtgatggctgtggcaagaagaagatccctcgggagacgtttcaggaccatgttagagcatgcagcaaatgccgggttctctgcagattccacaccgttggctgttcagagatggtggagactgagaacctgcaggatcatgagctgcagcggctacgggaacacctagccctactgctgagctcattcttggaggcccaagcctctccaggaaccttgaaccaggtggggccagagctactccagcggtgccagattttggagcagaagatagcaacctttgagaacattgtctgcgtcttgaaccgtgaagtagagagggtagcagtgactgcagaggcttgtagccggcagcaccggctagaccaggacaagattgaggccctgagtaacaaggtgcaacagctggagaggagcatcggcctcaaggacctggccatggctgacctggagcagaaggtctccgagttggaagtatccacctatgatggggtcttcatctggaagatctctgacttcaccagaaagcgtcaggaagccgtagctggccggacaccagctatcttctccccagccttctacacaagcagatatggctacaagatgtgtctacgagtctacttgaatggcgacggcactgggcggggaactcatctgtctctcttcttcgtggtgatgaaaggccccaatgatgctctgttgcagtggccttttaatcagaaggtaacattgatgttgctggaccataacaaccgggagcatgtgatcgacgcattcaggcccgatgtaacctcgtcctccttccagaggcctgtcagtgacatgaacatcgccagtggctgccccctcttctgccctgtgtccaagatggaggccaagaattcctatgtgcgggatgatgcgatcttcatcaaagctattgtggacctaacaggactctagccacccctgctaagaatagcagctcagtgaggagctgtcacattaggccagccaggccctgccacacacgggtgggcaggcttggtgtaaatgctggggagggcctcagcctagagccaatcaccatcacacagaaaggcaggaagaagcctccagttggccttcagctggcaaactgagttggacggtccactgagctcaagggcctggtggagcccgctggggagcttctcagctttccaataggaaagctcctgctgtctcctctgtctggggaagggagagacctgtaggtgggtgctcagaaagggcctctccagagagagtctcaagagctgcagcaggagcaaagtgactggccttccccaccccatcctttggaaaagaggtagcggctacacaggagaaggcatgcgcctgcagggtgtagcccaagagagaagctctctgagacataggccctcactggagaagggcctgcctgggctgcacagccttgccaggtggcctgtatgggggagaagtgattaaatgttgagatgtct

SEQ ID NO: 398 - protein, 501 aa, Mus Musculus
MAAASVTSPGSLELLQPGFSKTLLGTRLEAKYLCSACKNILRRPFQAQCGHRYCSFCLTSILSSGPQNCAACVYEGLYEEGISILESSSAFPDNAARREVESLPAVCPNDGCTWKGTLKEYESCHEGLCPFLLTECPACKGLVRLSEKEHHTEQECPKRSLSCQHCRAPCSHVDLEVHYEVCPKFPLTCDGCGKKKIPRETFQDHVRACSKCRVLCRFHTVGCSEMVETENLQDHELQRLREHLALLLSSFLEAQASPGTLNQVGPELLQRCQILEQKIATFENIVCVLNREVERVAVTAEACSRQHRLDQDKIEALSNKVQQLERSIGLKDLAMADLEQKVSELEVSTYDGVFIWKISDFTRKRQEAVAGRTPAIFSPAFYTSRYGYKMCLRVYLNGDGTGRGTHLSLFFVVMKGPNDALLQWPFNQKVTLMLLDHNNREHVIDAFRPDVTSSSFQRPVSDMNIASGCPLFCPVSKMEAKNSYVRDDAIFIKAIVDLTGL

SEQ ID NO: 399 - DNA, 26131 bp, Mus Musculus
ggaagtgacgctttgttgacagcacacccgcagccacaggctctccaagccttcggaacaggatcggggggaggggctgggcccggagccaagcagccggcggcccgagggcaagggaacggcctccgtccggggctccggtcgcagcattcccgccctgccccgccccgccccgccgacccggacccggaccggatccgacctcctgcggcgctttggccgccgattcccccgggccgcagcctccgcttgtaagcctgcgaagcatcctgtctccccgttgagggccgccccctcctagggtacgtcctaaatgccgagccaagagacgtacctgcatccttttcttcaccctgtctcagggtctaagcattgtcgctgcgactccttgcagaggtccaccacaggctagtggtgggatggcgctcgtcgcctgccacccaggtctgaggattttgccttgaaaattgagctctctctagaatgagaacgacgctcgcccttgcaaaatgggggctcaacgtagggcttaggaggccagcctctgcccctcctacctgttggatgagtttaggtcttctcccaacccccgaagccgtgctacttaaaagcttagggatggcttggctcctggatcagctcccaaaatgcgatgccaaggtacaagatagtgcaacagggtcggaaaagagcgggtgggcttgctgaagatcaatggctcccataggtgaggtgaaactaaaactgaccgctctggctagctctgggtagatttagctgctctttaaccagtcaaagcttccccgggtttgcttgtgccttgtgtgtatgacagagacgggagggggagcagagggttgggggtagtggtgcctaatgcctgggaaaagctaactcaatgatgtttctgacagaatggttctctacaggcttcaagttagagtgaccggtggagatagcattgaaaggggggtcacagaagctatgctttgaccaagaggttcttgttaggtatgaagggtcgatgtgctttgccttattcagtaaataaacgtacaacatgtttgatagtaataggtgtcacgaagcagagactgggacctctgtatagaatggtcagggaaggtctctaatgaggtttctgtctgagcagagatgagtgaggtagaaagtcattacagctttctgggggctcagcattcagcagcaggcgcaaagatcctgtggtggcaagagaacccgcttgggtctgaatgaaggaggcagagtgggtggcaaggaaatcaagtgagaagaaataaccgcagggaacatattagggactggcttgtgatgcagggttgatttgtaatttttgaaatgttggagaagaatcaattgtctgaggtgacaaatgaccaatgtacttcagccctgtgttttaagtgccctcttgctgtctgtactgaacatccatggcagaaattaaaagagatttctgcgggaaagtcatgtcacattactgtttcctcgtagttagaatgtgagcaggtgaccttctgcctcggtctttccatctgtagaataggactgctaagctacagggtgcatgtgtggcagtgtggtacatgacaggagggatccacccacgacacagtcctgcagcccttctttctagcatcagctggaggcatcaccagctctgtctgactcccctggctcataggatttgtaggaatactgggggaagctaagtagaactttatgacaccattcactggtaaaagtaatggtctgttcttcggggtatctgtgaccttggccttgattgtttgttgtgtttgtttagacaagttctcactctgtagtgagactggcaacggcctgtggaatccagactgagcttgaactcagcagttctcctcagcatcccaaaggctaggactgcaaacaggagccaccaactccagctggtggccatacatacatacatacatacatacatacatttatttattcatttatttatttagaggcagtttcatgtagacaaggctggcttcaatcttgctatgtggtcttgaattcatagagcttgatctgcaactgcctcctgatacagttccatcagattatatgtgtgtaccaccatgcctgacccaaaaaggacttttaaaatcaagccctgaatatccccattctgtaacataatataagcaaaacgatgtcttccagacagattggaaaagaactgtgttggacctatctgtggcactgagtgtgtgatcgaacttcaggtagaggctgtgaattctgaaggcccctggcacaggctgaaaatctgcagcctttgaggagaacaactccagatcttctcagcccttgaacctgactacatcatcaggcctgtgctattggctgagcagggccagaggatttgaaaatgcaaggccaagggtcagaggctatggctgagtgatagaacacttgcctagggtccataaacccctggggcccaccccatgcaccacaaaattaagtaacatgtaaatgtgtaaagtcagtgattagaagacaggagcctcaacggcagagaaagcttctctgaccagaaccccagactagcactgtggtgagccagggcctagcacagttctgctgccagcttattgtatatagttacgtgaatctgttgctccttctgaacctcggttttccctgctttacgcagagaatggtgtcctcctgcccctgctgaccctggagagagcggtaggatgaaaccagacactggtcagagaagagtttatccttcactcatgctcgcagtggtgaagaacacttgctgttaccgttcatgccactgggttcgtacaggggcatctagggcccacatgctcagggcccactttgcctccaggtgttcgtttgtgtttaacagttacttagggaagtaccacagcacatttgtggaggcccgaggacaatttataagagttgttctctttccaccatgaggggcccgaggctgaatgcaggctttcagtctcggcagcactaaccactgaagcatcttacggtcttgcctttggtgggtgtgtttcgttagcctcactgctgcagttcttgattccaggaatgtgagctcagaaaccactatggagtcagctctttggggaccaacatcaaacctggttcattcactagagctgggtttctggcttcagaagtgagcaaagtcctggggatatggctcagactgtaagcatgcttgcaaacacgaggacccaagttcaatccccggcacccatatacagaagccatctgctgacatgcactggtaatcccagagatggagagacaaacgggaggatcccagctagcccaacatgtgctctttaatatacaatggaggtcctgtgacttgtgcacggtccctacttttaggaagcttctagccctggtccatggtgcccatagaatcattaccagaaaaccagatcatctgtggtcagtgctcaaggatgcttggagttgtaaggaggttctgatggcagagaagagaaaatgaggcttgcccaagtcgctgtaggcggcacctccgagaacagacctggaaagctggaaagcccaggtctgacctactgagtggagagcgcatatctatgtactgtgcagactgcttggcacacagcctcagatgccacacctgcaggctgtagatcgatccctgcctcctgggaggatgaagggagccagtgggtatccagggctgagcagtgtaggcactaggaagtttgactacacaagcagaacccaagcagcctgccccagtgttctgtccttcctcagtgtgtgtgcattgttactttgtcaggagagataccagcagcatgctgggcatgtgcagtcttcccccattctgtgtcttcctagcagtgacctgcaggcatcgactctgtagatgtctttctctaacctcacttgcacctctgtccccgagagtcccctgacacttgtctggactatcgacacagcagcgttctgtccctaatctccagcctgggacctattccttcctggaagacattcaacctctataaagagggttcccagagctcatgggttaacatttcacaggatgggcactgctccaaggtttggatcctctggctccccagagtctctcttcctaggtgtcaagatgttgctgtggtcccttgcttcctcctctgaacattggttactctcttattcatttatcattttatttttattttgtggttttttttgagacagggtttctttgtgtaacagccctggatgccctgaaaccctctgtagaccaggttggcctcagactcagagggacccacctgcctctgcctcccaagcactcagactaaaggtgtgcatcaccatgctcagctaactctctctctagctggttgactggatgaatgaagcagtgtggttggtgagcactttagatgtacagaggtgtcatctcaggctccttttgtgggacttagggttctccgtgtcgtcttcagcaagtgactagccgtctctacctcagagtgccatcgtgaggtgatactggcaacagcaaacctttgttccgcctaaatgccaggcactagtaggcacagaggatgtgggggtgggtgcaagccgccagtctgtcctctggagctggcagctggggggagggtcatagacaaattgttatgcaaatgaatgggtctctattggtacagagtactgggctgtgatgtttggctggtttaaataagaaactgtaggaagtaaattctggaaggagctgggtatccctcaggaagcacagaggatggaggtggtacagcacagcgggggtggctgcctgggctgctgttgtttttctccatcttttcttccactgcccttcccccagcatgtcttaacgagcctgtaagaaaagagacatggggttcttctctggttgtctagcaatttcagagtccaaactgtctccagttgccagaattccagatggctggaacctgccttgagagtggaaacccttaaaggctccaaggggtggagtggtagggtgtcgtgagcctctaggctttggttccaatgagggcagctccttcctccccagctcacccagatcccccatagccctgaccccttcaaagctgtagggtcggctcctggaggaggtgaacacaggtgacaccattcaccagtctgttctctggaggcctttggtgacttgggcaactgatattatggtgtcccttccatgtgtgcagcccagctagcgcagggtagctacctggggccagggctcagccctgcagaaaaggcagttctttcccagccaggcacaaggttctaccttggcccatagggattcagcagtattctggggacagtgaactcacgctcagcctcatgagaatcgcatcctgccagtccactgtgactcctgccatggtgtttgttgttgaaacttccctttccccaagccccgcgcttagtattcagtaccaactgtgttcatttcccaggagccatggatctgggctctcagtgcctgcatcctctgtaccccaagctctcagccattgcatgtgtcttcctacctcgagcattcagagctagctaggactcatctctgtggtcttagctaaaatgtcaaaccttccctgatgctccagcccagagtgacagggacccttcctctgtccttcagagcactgttcgtgagatgtgactgtatctgggttctttttaggtagctgattgtctccttctagtgccagaatgtttcatagaggcaggaccttgtctggtttgctcattataggacctgtgtcctcagtagctcatggctaggtccataattactacaggaacagtcagcttgaaggactagcctggtctacagattgagttccaagacaaccagggctacacagaaaatctgactcaggggagcctcagcaagaccctcctcatggggtagggcctccctagacattgggatggtagaatgggctctgtaagaggacttagttcatgctttgtagaggcaagatactcactgattggaactggacagtcctagcagatggaggggttacaagtgtggggccacaggtgagcaggcctggggctcttgccatcctgtggagggggtaaactagagagggtccaggaactaaggaagctggaaagctggtccccagcagggctggcctcgctatgctgctccctctgatgtcattaggctgaaggccaggcttaaggggtctgcaagtgaggaaggtcttagggctgtccaagaagtccatttgtgctatccccagagagtgttacatttccactgggccgggtgaagcatgggttgtgtgggaggcctgggtctagggagaacagaccctacttgacatagaagtgagagcagtgtggctaaacgtggctgtggcaatcctaatagctgcttttaaagaaaaaaagaaggctgggcgtggtggtgcacacctttaatcccagcactcaggaagcagaggcaggtggatttctgagttggaggccagcctgctctacaaagtgagttccaggacagccagagctatacagagaaaccctgtctcgaaaaacaaaacaaaacaaaacaaaaaacaaaaaagaaaaagtcaaaataccagggccttagagctggcgctgcagttaggagtacttgtttgcgacccagtaccacatagtgtctcacaaacacccataactccagttccaggggtgccgtgacatcttttgccttcaagcaccaggcaggcatgtagtccatgaacatacatgcaggcaaaatactcacacatctcaaataacttaagtacagctaagaaaaaataactgttttaaagtacatactattcttacagagacctgagttcagttcccagcacctgcatcaggcagcttgcagtgacctcaaaccccagctcttggggttttggcattctcttctggcctccatgtgtgtctgttctgtgagcatgtatctcccccctacacacacgaaatgtaagttagttttagggcataatggcccatgcctttaattctcctagctccgtgtattaattatacatacacatatatgtatacatatacatatatagatagatgtcagatcacctggaactggagttacagacagttgtgagctgccatgtagatgctgggaattgaatctaagtcctctggaagaacagccagagcccctctcccttttttttttctttccgagacagggtttctctgtgtagccctagctgtcctggaactcactctgtagaccaggctgaccttgaactcagaaatccacctgcctctgcctccaagtgctgtaattaaaggcgtgcaccaccactgcccggctcagccagtgctcttaaccactgagctgcctctccagcccccatttttattttattaatatggggttttactaagttgctcaggttggtcctgaaccagtcatcctcctatctcagcgtccccagtgcaggcaatgttgtctcttgcctcctgtcctgagtagcttaaagggctcaggagtggacatagaagctaagcccataccccatttggaaccttcctctaaggctgtggttctcaacctccctagtgctgtgacccttaaatatagttcctcttgtggtaacccccaatcttaaaataattttcattgctactttataactgtaattttgcttctatgatgaattataatataaatatctatgctttccaatggtcttataacctgtgaaggaatcattccaccctcccaaaggggtcaagacgcacaggttgagaagtgctgttgtaaggacggagccagacaccagtttgtacagtgtagccttgagtctctgagctcgcacatccttatctgtcccacgaccagagctcatgcactgtgtgccgtgagcagcactatcccctcaactcctccagccctggagaagagttatcatcctcatgttttccagctgaggacactgtggtctgaagaagtgacattgtttaccagtaaattctggaatggagtcagaacacagacctgtctgtctgaccttagcacctgtgcttttgggtagatgttgggaattcattccaaatctcatgtggtaagcatgggctgtactacatctcagaacacttaaacttgtctcaagttcagtatcacaagggattgagttgaagactgggttgggtaccaaaatccacagatgcccaaggtgtttatatacatagtacatagtactcacacagagccaagcttaggttgatctctgcaagatcagtatgcactctaaactactgtaccatctccaacctgtaggaactgtttcttgttcacctaagtgcaatatgaagattcagttctgcagccattgttgacactatattaacttgcttagcactggaatgcatccagatctcttccaagtatggatccctttgattggtcccaatgttttggtttgctgtttgagactggttttctctgtgtagtcctggctggccggagctttctgtatagaccaagctggccttgaactcatagttaaccacctgcctctgcctcccaagttctaggactaaaatgtgccaccacacctggctggcaacaaccatttttaatctctttatagaattctagtattctccactgtgagacaactcacaatggagacaacctgtgagtccacggagaggaaagacccaaagcccatctgcacccagaaactcccctcaagtgtacacacatccttgccaaggacgcaggcctgtcccaacatagacctcctatgtattagcagaagggagcacgcctggagcaaacacagtgtcctcttgcttctgactccttcctgttacactctatgggtcatccaagtggttgactgtgttctcagtgctgtgtggcagtgaatttactgtttttatcccctgcaaatgtcagtggacattcacgggtctcttcttctggaggccgtcacatagaatattgctttcaatatttagtgtgttttcaaagtttcatttattactagatatgtgtaagaatgtaggtatgtacctgccacagtccctgtaaggagatcagaaggcaacttctgggtgtctgttgtctcttccactgtgtgttctggggcttgaaatcaggtctgcaggcttacatggcagacacctttacccccaagccatctcactggctctgtttgcacactcacacagcacctctgttgggtatggtcctgtgggcagacttgctgaaccttgaaagcacattcccgctcagcagtcaatattgttgagcatctccagttactgctcgagtcacactgccttacagtcccaccagcatccgtatcttcaccagggcctggtgtctgcagtagagctggctggctgtgggaaaaggcatctcattgtgggttggtgtacattttgctgatcctgatggaggcagccgtcctgaaggaggtacctgtgctggtctcctgcctgcctttacgctggtgcgtgtgctgcacctctcctcctgggctacagatgctgcctctgcaccgccatgcctggctggggccaagcattttcaaatctctttactgatgtttaatatacatgcgaatgttcacagtgaagacagctgtgggtccactcagaggaaggaccagatatgctttgtagtctgtggctcccttctcttcctcctccttcctcccctcattcccccttccttcccccatctccattatgctacctaggcttgaattgatcctttatttatttatttatttatttatttattttttccaaaacagggtttctctgtatagccctggaactcactttgtagaccaggctgtcctggaactcagaaatccgcctgcctctgcctcccgagtgctgggattaaagccgtgcgccaccacgcctggctatagtgtatttggaactaacttttgtatatatatgaacagaaatttcttcactccagtgcataccagttcaactttttctcccttgtgattagcattttgaggtctgctaaaaaatcttaggggaggccagaagtggtggcgcatgcctctaatcccagcacttgggaggcagaggcaggcagatttctgagttccaggacagccaggactacacagagaaaccctgtctcgaaaaaaaacaaaccccccccccaaaaaaaattaaatttaattttaaaaaagggggagggggaaagaaagagagagagtgcaatcttggggaagtgtcctgagaggcggctccgttgctcccagcacttgcttttgcagagtacttgggtttgggtctcatctgcacatggtggctcacaaccatctgtaatctgagttctaggagatctgatttctttcctgagctaattgggcactgcatgcccctcgaattggaattctagtaccatgtacgttctgggaattgaacccagggcctatgcaagcgtagtagatgatgctcttaaccagcaagccatctctccagccatccatattttacattataaagtaacagtttcagtgcaattcacaggaggcgcaatccaaccatttgaagtatccagttccatggttttcagtggatacagtgtcagtactcccaaaggaaagcccatcccaggagtggtcactctgtcccccaggctgtcctccctccatctgtagacttttcctttgtggttgcacagcccaaggactgtgttgtcaccttcataattggttccttcagttagcatgacccagtgttatatgagaactttttgtgactggatgatattccaactttttatttagtcagggactcaatctgagctcaaaagctcaggctggtctggaattcctgatcctctttgcctctgcctcccaggtgctgggattacaggtttgtacagcctaaattttaaggtcctgatttgaatgtgatggatggatggggctccccattcaccaatcaagaagtagacacaggttcttatctgcatctcatttggctgcttttctccttcccaggctgtggctctgccaatgatcttgtgattattggtaatccatagttgcccttgtgggccgctgctgccgtctcccagcatggcgtctgacacgcccgagtccctgatggccctctgtactgacttctgtctccggaatcttgatggcaccctgggctacctcctggacaaagagaccctgcggctgcatccagacatcttcttgcccagtgaaatctgtgaccagctggtcaatgagtgagcaagggtctccccaggactgggcagggttggagcccaatgtgaggggtgaagttgagctgatgatcaagaccaaggcaagggggagtggctgtgagggtcaatgtgttaccagacatatggttacatgtgcattggtgtgtatgcacaggggcacacatgaaggaatgggtatacatgtaggattatgcagcacagaacgtgtgtgtgtgtgtgtgaagcaccatgtgtgtgatgacagataagttactataaagtcctgcatgtacatgggccagcattatgtgctcctgtgtgtgtgctcgcacctgtgcctgcacctctgaactacgtacacataaacacgtgtgtcaagatcagaacagtagacctgtgatcagagactgactcacgcagatgctctttgtacagcctcctggtggatccccaccgctctggaaccccacagcacagtgtgcatgtccttcctgaatgcttagttaccagttgccccaacaggaaaccacaggatcaaagagtttcacagccagataggaaccaagggaaacaagctccttatgtgttctcagcactcagtgtaggccaggcatgtggctgaaccctttatcaacctagcatggagccaagtgcatctcatagatggaaagtctggggaggttcagttgcctgtgaaaggttcccgggtggaagcagcctagcatctgagatgctatgggtttcacagtgccaagagcttccatatctttcttattccgcctccttcctttttttggtttgtttctgggttgtgtttttgtttttgtttttgttttaaacaaagagggttgcactgttctttggctgacctgaaactcactttatagaccagtctagcctcaaactcagtgatccacctagctatgaccgcagatgctgaggatgtgcaatccaatgcctgcttcttttcaggtttttgggtttttttttttttttttttttttttttttttggttttttggtttttcaagacagggtttctctgtgtagcccttgttgacctgaaactcactctatagaccaggctggcctccagcccagagatccgcctgtctctgcctcctaagtactaggattaaaggtgtgtgcaacccactcaccccccaactgggtcttttcatttgagacaattcatttacttattttacataaatatgtcttcagacacaccagaagagggcatcaagtcccattacagatggttgtgagccaccatatggttgctgggaattgaactcaggacctctagaagaacagccagtgctcttaaccgatgagccatctctccagccctcttttatttttaaaagagccaccatgtaggtgctaggaactaaataccagtactctccaagaacaaatattcttaacagctggaccatctctctaagccgctagcctaggattcatgcacaaaaggctgtcttggctagatagggttatactgatagctcagactgcccaacaggcaactgtaagcacaaaaccattttgatttgcctgccctggaaggggatgataaggcaccagaggctactaaggaagagtccagacttggtgtgatgtggctgaggtcagtgcacacccagtatgttagggcgtgcctaggaagaggggaacacatgttatgggttacaggtatgtgtttaggcagagtgctagaaggaagttcttgggacttgctggtgatcaccctgaagaccacctttagattcctatgccctggggcctatggatagtcagagtctaagcagatgctgtgaagagaggtgacagttgcctagttgatgtcatagcccccaggcctgtgatatggcttccagaggcagcccggctcctaggtacttaatgagctaggcttgcttctctcgaaggtatgtggagctggtcagtgctgcctgcacttttgagccacacgagactttcttcagcctcttctcagacccccgcagtactcggctcactcgcatccaccttcgtgaggacctggtgcaggaccaggacctggaagccattcgcaaacaggtgagaccctgcccaccccccagaagccaggcctgaggtggctcagggcaggcagaggagttgagactgctgtgctactccaggacctggtggagctctacctgaccaactgcgagaagctgtccgccaagagcctgcagacactgcggagcttccgacacagtctggtgtccttgagtctctccggctgtgccaacatcttctatgaggaggacaacccaggcggctgtgaggatgagtgcctggtcaaccccacctgccaggtgctggtcaaggacttcaccttcgagggcttcagccgcctgcgcttcctcaacctgggccgcatgattgacggtatccccgtagagtcactgcttcggccactcaactccctggccgccttggacctctcaggcatccagacaagtgatgccactttcctaacacagtggaaggacagtctgatgtcccttgtgctctacaacatggacctttcagatgaccacatccgtgtcattgtccagctgcacaagctgcggtgagcacccggggcaggagttagaccggggaggaagcaggggatagaggaaaggtggtgtcagtcctgcgtccatcagggaaacccttgcatggaacagagggagagagcccactctttagaccacacactgtagagagttgagggcaatttagggcacccaagtcccagcagggtgtttctccagaattccctggagaagctgtgacaggcatggacccttccctgctgtggcctgaaggagtaagatcctgacctgtggtccccacctgatctccagccacctggacatctcccgagaccgcctctccagctactacaagttcaagctgactcggaaggtgctcagcctcctagtgcagaagctggggaacctaatgtcactggacatctctggtcacatgatcctagagaactgcagcatctccaagacagatgaggaggcagggcagaccaggtgggtacctactctgccgctgggaggaggccactcactaagccctgagcaagttccctgtgcaaagtactgtgcaggttggtgaggctggcatggtaagcacacctttaatcacagtacaccagcgacaggctatgctcatctctgtggatttgaggccagccagagctgcatagcttcaaaagggagtggggtggctagagagaaggctcagcagtttagaactcttgttcttctatagggcccagggtgttttgttttgttttgttttttgttttttgttttttgtttttgtttggttggttggtttttttagacggggtttctctgtatagccctggctgtcctggactcattctgtagaccaggctggcctcgaactcagaaatccacctgcctctgcctcccaagtgctgggattaaaggtgtgtgctgccaccaccacccggcagggcccaggctttaagtcccagtacccacatggaggctcacaacctgtctgtaagtctagttccaggagacctgacatcctcttctggcctctgcaggcaccaggcacacacagagagtgcagcgtatatccaggcaaaatactcaaaccccacaaagttaaataatcattaaaaaaaaaaaggcacgggccagtgagatgcctcagcatgttaaagtgcttgtcaccagatctgacaacctgctttctgtccctgaaatccactcctacaaacatctgctgatgtccccatgagtgtgagcactcaagcatgcacaggcacatatacacacatattcaatacgttaacaggaaggaaggaaggaaggaagagaaagacagacggggagaggagggggagagagagagagagagagagacaggccctgaatgctgtggcccgtgtgagctgacaggaaaggaaagtcactctgggcactggcaggggaagtgcatactcgggctgcctgaagccttctgagtttgttgaagagatcacatagcagcatggtgatcttcctatcgtctggatcaatctgcaccgagatctggcaggttgagagcctaagaaacaaaccgcaccgggcatggtggaatggtagggaccagcagccagggaccagcagccagtggggaccagcagccaggggtactgctgtcccttaggtggtgccatggctgatctgggcctctgtgaactgctgagatctcattccaggccagccgctaagactggcctccagcctccctcagccgtatttagctttagatggctgaggagcttatcttgagctggagagatggctcagctggtaggagcacctattgctcttctgaagggcctgagttcaaaacccagcaacacatggtggctcacaaccatctatgatgagatctgacgccctcttctggtgtgtgtgaagtcagctacagtgtacctatgtacaataataagtaaatcttaaaaaaacaagaaaacagaaagaggagcttattcttgcttgtcagtgaaatgtgtctgtggtataatggcaggggacctttcaaaggtactggcagtggtggcagctcccagtccatgttctacagtacgccctcccacccttccatcaagaagtgagagcagggaatgcagctcaagtggtacaaagctctgactttgatcaaagcaggcagagaagcatgtgcctgtatcccagcacttgagaggtggggtaggaggaccaggggttgaaggtcaggctcagctccacagtgggttgggcagggacaggatgagattagaagccgttgtttctctatgggtggagttcctggtccatgggggagcccaggctaggtccagtcaggtggctagctctgacatgctctttccccagcaccgagccatccaagagcagcatcatgcccttccgggctctgaagaggccactgcagttccttgggctctttgagacctcattgtgtcgtcttacgcacattccagcctacaaagtaagaggtggagttgggaggaggaagtggccaggtaccgcatagcactgagtctggggtcccattacctgggttgtcctgacatgttctgtcactaggtgagtggtgacaaaaatgaagagcaggtgctgaacgccatcgaggcctacacagagcaccggcccgagatcacatccagggccatcaacctgctgtttgacattgcacgcattgaacgctgcaaccagcttctgcgggccctgaaggtcagctcagaacccaaggccctcaggctcccagatactgctgccctccttctctgtccttctgcacccagccctgatcccaggggaacaggtagtcttgccttgcaaacctccgccctttggcagtgctggcctcactgccagcctgtccaggccctgccctagtttctgatctcacatctccccaggagagcaagtctaaggtcagcctttccccagagaagacacggtgacttaaagagcccaggctgtctttgcctgcctctggcagtgccccagctccagccccttccctgtgttcacacagctggtcatcacagccctcaagtgtcacaagtatgacaaaaacattcaagtgaccggcagtgctgccctcttctacctgaccaactccgagtaccgctcggagcagagcgtcaagttgcggcggcaggtcatccaggtggtgctgaatggcatggagtcctaccaggaggtgacggtgagcccctgcctgctgcggcctgcatgcttaggcccagtatcccttcctgctccccaggctccccaggcttagggggcctttgccaactctcctcgcacagttgctgtcccagaaacctgcccctggcacacagggaccgcagaagctggcttcaactgcagtcccctgcctgtggccatcctacctctgccctctgtgttcctgatttgccattttctctgcccctctctccctatcattgttgggggtgggggagttctaaaaacaggtggtatctgtttttaattataaaataataaacatttaccatagaacagttacaaagacatgaaaaacacctaaaactctaccacacacctagccttcccctgccgtccttactctgagatgtggtctatgcatgagaatttagtaaacaggttgtctgcaccactctgcatgtttgtgtaatgtggatgccatttgttttgttttcttttcttctcttttgagacagggtctcactctagctctctctggcaagtccttacatgaaccaggctggcctcgaactcagagctctgcctgccacagcctgtagagctgaataacgatgcgcaccgcatcgttacttccagcttcaccagggctggcactaaaggcgtggtgcacatcagtgtgtttgagctctgctttgaagatgtggcctacccaaaagagaaaaagaatggggatcaggcataccggctcttgcctgtgagcccagcctcaggagactgaggtgggattgaggtctgggcttcagtgtcaaaccctgtctcaagaagaaaatcaagaaaatggggcaaggacagatggttcagcagtttagagcactggctactgttgcagaggacccaggttcaaatggcatatctcacacccatctgtaactccagtctcagggatgcagcaccctcttctggcctcagtgggcacagcatgcatatggtacacagacatatgtgctagcaaaacacctacatacataaaattaaaatcaagaaataaaaggagttgttgttgggtggtggtggcacactcctttagtctcagcagtcaggatacagaggcaggcagatctctggagttccaggctagcctggtctacatagtgagttccaggacagtcagagctacacagaagaacctctcagaaacaacaacaacaaaggagctaggacagtagttttctgcagaaattgtagcatataaacattgtaaagggttggttacctttaaactttaaggctagggcagatgcaggaggactctctctgagtttgaggctagcttcatctacacagtgagttccaagacagccagggctacacaaagaaagcctatttcaaacaagaaaaaaaaaagcaaaataagctttctcaaattacagtatttggggccggggtgtaagtcaatgttggagtatttgcctagcatgtacagagcatggggtccggggctcggctcccagcattgtaaaactgtgtgcgtgtgtgttgtatgataaagggaaaagcaaggtgttgcctaaggggccataccctctaaacagtgtattcgataaagcatggagagtgacaatacttaataaagaagaatgtagggctgggttgatggctcagtgctcaagttaaaggcacttgttacaagcagatctttgtgaattccaggacagcaggacagccagggatacacaaaaaaagcctgtcttgaaagccacacacacacacacacaaacttttactattacccctgcagagaacatgggtttagttgccaacacccatttggtggtggctcccaagtggctgtaattccagatccaaggaatccagcactgtctgccctcccctgtcacaatgcatggtgcatctatgcaggcaaaacactcaaaatatgtttaacaaggaagaaaaggagattaaatgacgaccagtatagtacatttatgcatcatcataaatgttcaggctgggaaagaacaactgagaaggggtgtggccagatgcctgtacacagccacctggatgacagcctggtgctgtctagcaacatgaacatgtgtccacctacaccttctgatccagagagccctcaagcaagccaggcttggtggagggaagaggatcagaagttcagtgtcattattattttataataaataaaacttaaaaaaaagaaaagacagcaagtattagttgagcctggtggtatagtaaggcagcaagggtgggagttaaaagctagccctggctacgtgatcctcagctcagcccggactacgtgagaccctcatctccatctcagaaacctacaaaccaaacaaaccaaaaagcctgctagcttcctcttccagagagcctccccagctctgggtaacctctgacctggagtcctgtcccaaatctgtccctgaacgtgctctgcttgtctcccaacctggcccaggtgcagcggaactgctgtctgaccctctgcaacttcagcatccccgaggaactggagttccagtaccgccgggtgaacgagctgctgctgggcatcctcagccccacgcgtcaggacgagtcaatccagcggatcgctgtgcacttgtgcaatgccctggtctgccaggtggacaatgaccataaggaggctgtaggcaagatgggcttcgtcgtggtatgtgaacttgactgccctcgtcctcctgttctctgtgagggaggctgcaagaggacctggcatcagggggaggagggggaggagattctttagggtagacccaaggaagtgcatctctgttcttgttgggggtgagctggaggaggggattgctaagggctgagcatgagcctggcacatgctagcaatcagcccagcacactgagcttcacactaccactgaacactctttccttcgtgtgtgtgtgtgtgtgtgtgtgtgtgtgtgtgtgtgtgtgtgtgtgtgtgtgtgtgagtgttggtgagtgcttctggaggccagagttgtttgatccacctggagctggagttacaggtggccatgagccttctgacatgagtgctgagaattgaacttgggtcctctgcaagagtaggacataatcctaaccacggaaccatctctacacttccctagaagagttgcttgcttgcttgcttgtttgtttgtgacatggtctctctatgtagccctggctggcccagaacttgctatgaccacaggctggtctctgagtcagaaagataactttcctctacctcccctgagtgctcgtagtaaatgtgggcaccaccatgcccatctcagaagaatttcttgtgctttgtttttcagacagggtttctctgtgtagccctggctgtcctggaactcaatctgtagaccaggctgcccttgaactaagagatccacctgcctctgctttccaagtgctgggattaaagattgtaccaccacgcctggctttcagaagactttcttaatgtgactgttgctatgactttgtagtcttctctgtctttaactacttccactcagctccatgcagtaagccctatgacaaaagacccagggctggcccttcatcactatgcctttctggcctggtatgaataaattattagcctagcacctgggacaggataaatatggaaggaaaggaagatttgggggttaggggcaccaattgtcaccctcccttatccctggggaagtgcagcgcctagcagagaagcactgtgacaagtgtgtccccaggtgtgtccttgaccaccctcaaatcacttccaaaagacctgggtgctgccaggctgtgtcacctgggacaggcagtgccccctccctgctgagctcctaagctggtggagccttctgactcaggcaacctctctcctctgcccacagaccatgttgaagctgatccagaagaaactgctggacaagacggtaagcagagctcacacactctgctctcaccccagagccttctgtgtcagagttggccatgtgtcctcaggaggacatagctgagctgtgcctcccccacagtgtgaccaggtcatggagttctcctggagtgctctgtggaacatcacagatgagacacctgacaactgcgagatgttcctcaacttcaatggcatgaagctctttctcgactgcctgaaggtaggcagttcccggctgccaccatcccacaggtgccatcccacacaagcctcccatgggcacacagggccagccacacacagacaatgtctgctgctgagagacgtgtcaggaacctcctctcagccatgccgtccagctgtgccccctgttctgttctgcctgcccacagaccattccctgctaacaagataaaattctgcccagaatgtaggactctgttttgttggtagcttcttaggggctcccctaaaaggactcttctgagctgtggcaagtggagccacaatcctcccaagtcagctctcttcggggcctctctcctggtagcactggagagttgggcttggcttactgtacctctcctttgtctagaaggtcccttcacacaggtgcccacaaaacctgcagggtaacagtatcagacatgaagggaccaagtatgaaggccttgctggttctcgttccccaggagttcccagagaagcaggagctacaccgtaacatgctagggctcttggggaatgtggcagaggtaaaggagctgcgacctcagttgatgacctcccagttcatcagcgtcttcaggttggtacttcctgggccaccagaatactcagaacaattgtgtacactgtgaacactgtgctctgtccagtttctgttcttgatactgccttctctctatattgtgctttttaaaaaaaattatttactttatgtatatgagtacactgtagtttttttaagacaccccagaatagggcatcagatcccattacagatggttgtgagttgctatgtggttgctgggaattgaactcaggacctctggaagagcagtcagtgctcttaaccactgagccatctctccagcccctataatgtgcttttgttttcttttgatcctgtttttcattctgtgtatgtgagggatgggtatgtgcccatgagtgcagctgcccataaaggctaaggctctgggtcttttctcaagagctgaagggcacaagtgattgcaagccatcatgggtactgggacctagctccaggatgaaagagcagtgttttagtctttcagcctaccacagatggcagtaatgttacatccttttctctgaaggactgtgtataccaagtggctagatgttgtgacatgagcttgggaaatgaagcaggaatcttgaccaacaacaaactccaagccagcctgactcaaaagtagaaaaaaaagagccaagtgattttcagctgagcagtggtgcaggcttgtaaccctggcaaccacgaggctgaagcaggaggatgtagagtagtggccgcccacgagcacacgcatgatggattttctctctcttggtagcaacctgctggagagcaaggccgacggcattgaggtttcttacaacgcctgtggtgtcctctctcacatcatgtttgatgggcctgaggcctggggtgtctgtgaacctcagagggcagaggtggaggatcgtatgtgggcggccatccagagctgggatatcaactcccgaaggaatatcaactacaggtcagagatgggaaggtacacagcatggagaatcagaagctgcttgtctcaacatggggtgccagagctttccaccctggtcctgttctccaaaggtgtttgccctcactcactgtaaggtccagtgtgtgaggggcacctctcccacttgttaacatgtgcatctagccaggcctgtctcttatgcatgttacatacagcaaaacacaagtcacctgtcaccccgcccatggccatccggctgcctcagtccttctccctgccacgctgtgtatggtaaacagttgaaaggaaagccatcttgagcggctgtgctcaggccccaggtccctgggaggcaggaagctgaatcccaggacgcttgtgaatgaagcttggctgataagaattattgtaggtttctctcaaggctcccttccttaccagttcacactcttggttaccaagaccctagctttctgccctctccctcttccctgactttggtcttctccagagcgagcttctgggtggggccagcagcagggccctggcatcctacaggcttgcccatgctgcctttaggaccctgcatggaggagaaagcctccccctccccagcctccaggtaaaagtggtctctctcctgcaggtcctttgagccaatcctccgcctccttccccagggtatttctccagtcagccagcactgggccacctgggccctgtacaacctcgtgtctgtctaccgtgagtgcctcccatcccttagctcagtcactcagttgaacacagcatatccacagggagctggcacacagggatttactgttggcattggagagatgccagtgtgcctgttagcctagtgcaccatcagaggtgcctttcttcacactcttcccctacctgccagtgaacttcccagtctttttgccacctgcagggcagaaggacacctggctggttaccacagtcacctgggggtgccttactagcaacatcataaattccagcttctgcctgtggaatctggtcccagaacttccagggaacctgtgtcacgatacaaacctctccgagagagttcatgctttgggcctgtggtcaagatatttcccataggaccaactccaggaaaattataaccacaatttctgggaaacagtggggaagtacctttcccaaagacttgcccattcccttccatgtggccccaggagccttgacacccttggcctgttcctgctccctcttggcagtgtctttccccaggcagcaactgtagaacagttctggtcaacattctgcgtgtctgggaacaggccggtagatgcacactgtcctcactattgcccctaccttatagctgacaagtactgccccctgctgattaaagaaggtgggatgcccctgctgagagacttgatcaagatggcaactgcccggcaggaaaccaaggagatggcccggtaagaaacaaactgcattcctgactaggtaccttggtatgggggcaaagggcacagtggggatggcagaaatctccaggagttatcagtgttgagtgtggagcaaacagtgtatgggtgtccagcagaggcctcttgtcattgcccatggatgacagacagggtctcaactctcaggggagctgctctgctttcaattcccactgagcaccgagcactagcaagcactctacattatttttgatcagtgttattccaataaaaatggactcagtgcagtgagcgtatgctagaagccacgtgcatacagtgctgggttatttgaacgcaaatatgagggaaacgcacccttggatggcaggggtgaagctcagcggtacagctctcgcctagcgtgtacagggccccatgcacacagagatgatatcagagtgaagggcggggcatgccagaaccctccctggtcttctgtgtctctgagattcagtgttgaatgtttaagcctcagttctgattgtccctccttcccagtgtgcactagaatgtacactacattagaatcagtgggattgcattgccttcctcgtgcctggatccatgctctctgggaggttattcctttgtcacaaatctgagcacgggatagcctgagcctcagaaacacccccaccccccatccccacgcctttctgttgtggagaccccagccagcaccctgccattcagtctttctggtgaagagactggttcagtttgaactgactggtcctcgaactcagtgtcccttgggagtcccctggaaagtgttagaactgaacagctgcctgcagattttttaccagtgggcttggggctatctatgttagacaagatccaggacttttctgtggggcttgtcagcgagccctcttggtcccctgaggcctgcagtgtgtgagccagcaggtatctgcttcaaggaatgaactatcctgggaatttccttctcaaaagccctcagtgcagcctgtcagcaaatggaggctgcaataaaccccaaaaccctgagtctcccagttgaacaggcaagcagtgtaagggtgaactgcagtgggtggcagtgttctcggggagtaggctgagctggcacactgagggcctgtgcatatcttcagtctgtttggggggcccctgtgggcctctgagcagaggaagagctgctggctggcagagcagatgctgaagagggcagcagtgggtttgggaggttaggcatggctgctggtaggacttcctccttttcctaagttgagggcagtggcagcattcatggccacaggtactacttcccaggtgtgctgccaatcactggcaacaccattcaagactacgtcagggtcactcttaaagcttggtaagtaagtagctgtggggctccaggagagccgctctccttagccaccctccaatgctctccccggttttatccagcaaggtgattgagcactgcagtaactttagagaggagaacatggacacgtccagatagaggccacacagctcggaccacaggccgggaggaagcgctggaggtctagtgggcaggtccctttgcggagcctcctacagggtgaagaaacagcgaggacttgcacagccgacgcatttccttaatgttagtgagatatatattatatatatatatatatatatatatatatatattttttttttttttggttaggaagtgtgaagttttgtgtgtatgacttctcccgagtctttgcagctccttgccactcttggtccgcctccaagctttggttgctgccatgttccctcctgccccagccaggcttgcctctaatgctgtgagtgcctggccc

SEQ ID NO: 400 - DNA, 3018 bp, Mus Musculus
ggaagtgacgctttgttgacagcacacccgcagccacaggctctccaagccttcggaacaggatcggggggaggggctgggcccggagccaagcagccggcggcccgagggcaagggaacggcctccgtccggggctccggtcgcagcattcccgccctgccccgccccgccccgccgacccggacccggaccggatccgacctcctgcggcgctttggccgccgattcccccgggccgcagcctccgcttgtaagcctgcgaagcatcctgtctccccgttgagggccgccccctcctagggctgtggctctgccaatgatcttgtgattattggtaatccatagttgcccttgtgggccgctgctgccgtctcccagcatggcgtctgacacgcccgagtccctgatggccctctgtactgacttctgtctccggaatcttgatggcaccctgggctacctcctggacaaagagaccctgcggctgcatccagacatcttcttgcccagtgaaatctgtgaccagctggtcaatgagtatgtggagctggtcagtgctgcctgcacttttgagccacacgagactttcttcagcctcttctcagacccccgcagtactcggctcactcgcatccaccttcgtgaggacctggtgcaggaccaggacctggaagccattcgcaaacaggacctggtggagctctacctgaccaactgcgagaagctgtccgccaagagcctgcagacactgcggagcttccgacacagtctggtgtccttgagtctctccggctgtgccaacatcttctatgaggaggacaacccaggcggctgtgaggatgagtgcctggtcaaccccacctgccaggtgctggtcaaggacttcaccttcgagggcttcagccgcctgcgcttcctcaacctgggccgcatgattgacggtatccccgtagagtcactgcttcggccactcaactccctggccgccttggacctctcaggcatccagacaagtgatgccactttcctaacacagtggaaggacagtctgatgtcccttgtgctctacaacatggacctttcagatgaccacatccgtgtcattgtccagctgcacaagctgcgccacctggacatctcccgagaccgcctctccagctactacaagttcaagctgactcggaaggtgctcagcctcctagtgcagaagctggggaacctaatgtcactggacatctctggtcacatgatcctagagaactgcagcatctccaagacagatgaggaggcagggcagaccagcaccgagccatccaagagcagcatcatgcccttccgggctctgaagaggccactgcagttccttgggctctttgagacctcattgtgtcgtcttacgcacattccagcctacaaagtgagtggtgacaaaaatgaagagcaggtgctgaacgccatcgaggcctacacagagcaccggcccgagatcacatccagggccatcaacctgctgtttgacattgcacgcattgaacgctgcaaccagcttctgcgggccctgaagctggtcatcacagccctcaagtgtcacaagtatgacaaaaacattcaagtgaccggcagtgctgccctcttctacctgaccaactccgagtaccgctcggagcagagcgtcaagttgcggcggcaggtcatccaggtggtgctgaatggcatggagtcctaccaggaggtgacggtgcagcggaactgctgtctgaccctctgcaacttcagcatccccgaggaactggagttccagtaccgccgggtgaacgagctgctgctgggcatcctcagccccacgcgtcaggacgagtcaatccagcggatcgctgtgcacttgtgcaatgccctggtctgccaggtggacaatgaccataaggaggctgtaggcaagatgggcttcgtcgtgaccatgttgaagctgatccagaagaaactgctggacaagacgtgtgaccaggtcatggagttctcctggagtgctctgtggaacatcacagatgagacacctgacaactgcgagatgttcctcaacttcaatggcatgaagctctttctcgactgcctgaaggagttcccagagaagcaggagctacaccgtaacatgctagggctcttggggaatgtggcagaggtaaaggagctgcgacctcagttgatgacctcccagttcatcagcgtcttcagcaacctgctggagagcaaggccgacggcattgaggtttcttacaacgcctgtggtgtcctctctcacatcatgtttgatgggcctgaggcctggggtgtctgtgaacctcagagggcagaggtggaggatcgtatgtgggcggccatccagagctgggatatcaactcccgaaggaatatcaactacaggtcctttgagccaatcctccgcctccttccccagggtatttctccagtcagccagcactgggccacctgggccctgtacaacctcgtgtctgtctaccctgacaagtactgccccctgctgattaaagaaggtgggatgcccctgctgagagacttgatcaagatggcaactgcccggcaggaaaccaaggagatggcccgcaaggtgattgagcactgcagtaactttagagaggagaacatggacacgtccagatagaggccacacagctcggaccacaggccgggaggaagcgctggaggtctagtgggcaggtccctttgcggagcctcctacagggtgaagaaacagcgaggacttgcacagccgacgcatttccttaatgttagtgagatatatattatatatatatatatatatatatatatatatattttttttttttttggttaggaagtgtgaagttttgtgtgtatgacttctcccgagtctttgcagctccttgccactcttggtccgcctccaagctttggttgctgccatgttccctcctgccccagccaggcttgcctctaatgctgtgagtgcctggccc

SEQ ID NO: 401 - protein, 766 aa, Mus Musculus
MASDTPESLMALCTDFCLRNLDGTLGYLLDKETLRLHPDIFLPSEICDQLVNEYVELVSAACTFEPHETFFSLFSDPRSTRLTRIHLREDLVQDQDLEAIRKQDLVELYLTNCEKLSAKSLQTLRSFRHSLVSLSLSGCANIFYEEDNPGGCEDECLVNPTCQVLVKDFTFEGFSRLRFLNLGRMIDGIPVESLLRPLNSLAALDLSGIQTSDATFLTQWKDSLMSLVLYNMDLSDDHIRVIVQLHKLRHLDISRDRLSSYYKFKLTRKVLSLLVQKLGNLMSLDISGHMILENCSISKTDEEAGQTSTEPSKSSIMPFRALKRPLQFLGLFETSLCRLTHIPAYKVSGDKNEEQVLNAIEAYTEHRPEITSRAINLLFDIARIERCNQLLRALKLVITALKCHKYDKNIQVTGSAALFYLTNSEYRSEQSVKLRRQVIQVVLNGMESYQEVTVQRNCCLTLCNFSIPEELEFQYRRVNELLLGILSPTRQDESIQRIAVHLCNALVCQVDNDHKEAVGKMGFVVTMLKLIQKKLLDKTCDQVMEFSWSALWNITDETPDNCEMFLNFNGMKLFLDCLKEFPEKQELHRNMLGLLGNVAEVKELRPQLMTSQFISVFSNLLESKADGIEVSYNACGVLSHIMFDGPEAWGVCEPQRAEVEDRMWAAIQSWDINSRRNINYRSFEPILRLLPQGISPVSQHWATWALYNLVSVYPDKYCPLLIKEGGMPLLRDLIKMATARQETKEMARKVIEHCSNFREENMDTSR

SEQ ID NO: 402 - DNA, 29096 bp, Mus Musculus
  misc_feature (1)...(29096): n = A,T,C or G
cgcctccatgcccttgtcctgcctctggcccttgcctcttgccctagccttttctccgcctttaagttcttgtcccgtccctaggtccttgttccgcccccagggggcgggggcggggcggactaaggctggcctgccactccagcgagcaggctatctcctagttctcggctgctcggactagccattgccgccgcctcacctctgctgcaagtagcctcgccgtcggggagccctaccacagcgtccgccctcagcatgatggacttggagttgccaccgccaggactacagtcccagcaggtgctgccccaaccttcgggcccctgggctgtgccaagaagccggcaggagctcgaggggatagtggctccgggagggagggacagtctgagccaggactacgacggcagggcctgggaactgccccgccgagctgggagggcaacggaggatgttggggccgcgacgagagtggggtccgagcctgaggtctccaggggcggcgaggttggggtgtggaggaagctctgacttcgtggggccaggcagagacaccaccacctcgctgggtgggaggcgcagaggcgggaggggggtggatgctggcggtctaaaccggcgccgcccggccttttccggggcagcgtagtttccctgattcggtgccggtaaaaatgtgcctagtcacggggccgcgctcgggggagctgaggtctctcctcggcgtccgcccgaagccctccccaacccccgttctacgacttggtgagctcggccgtctgtggcctcagcccgagagctggtctgtaagatcacgcctgtccgtcttgatccagaaaagcccagccctccgggggcggaggagaaagtcaccgggtggccctcgtgctctggcgccccgacgggcggcctgccggcagggctccgcacgctccttcagcctgggaacccgggaatggcctcgcgccgggcgcaaggacgtgcagacctgggcggcgggctccgaggtccgagtgggccccatgctgggctgtgtgttctgagtatggtgacccgcggggccccacgtagtgtgcgaggctgtggcttctggctggcttacatcggccagttggcagtcacagaggccctcggttggccctttcctgctctatagcgtgcaaacctcgctgctctggggccaagggacaagttggagctgttgatcagttgcgcaattgttattttcccctgggcggctttgtctttggatttagcattacagagttgtaataccaaaatgtataaggcaggatattctggtccttgccgtcaagggtaagagtagtagattagaatttgttgctttttatactgttgcagaagttttgcttttagacatttatttattatccctcgcttgtgtccttaatacatttttctttgctgtttgagattctgcctcaattttcttagcatgttgcgcactttgaagacagcgaatgggacgcttgcgtttcataacactttcttgctaagttttgaagattgttatgtaagtgaaaaccagtttctggttatacttcaggcagttttaaagaagtaaatgcttatgttggcacacacgcgcacacacacacacaaaagagtcggaattggatttttaggaaaagaaaccatttaactccagggaatgtataactcggtaaagagtaagttagtttaaatgtaaagctttcggctgacctggaaggtcctggtgtcagtttttaagttattgacagtgcattaattctacccctcccttgaacttggccccgaaatgattggggttgtagcctggttttcattaggatgaataagtaaactgtattttctgatttctgctcttcatgagtaatcagaaggaatgcttcctggccacaggatacacggtgcaaatgaactttgactgtaaagtttttttttctctttcctgtgtagaataacatttcatttacaaaaatggcagctgtgctgctttctttctctgccgtgtgaaagctttgttagccggacatttctagttctttccagacattgatttaaatatttgaagaccttgaagaaatcatttaagatcataattcagctaaaaagcattgtttgatagtccagaaggatttgaattgagttacagatttaaagacatggtgagagtgattcagctgtggcactgtagcattttgttttaacagtgctcatggttagtagactccatggttcttcagcaccgggttgcgggggtgggcatccattactttcccactggtgtctaggaaagataaaatactttgttgaaggcaagagatgaagttgatcttgaataagacatatgagattatttttaaagacacattcgagattggcctctccagaatgaagggagagagaacaacttaagaaaaacttgactttctagataggtgacacatctctgaatctctgagacactacagaaaagccatgtgtaggtggataaacacagctacatcagtctctctgccttagaaataactaggaccactttggaattccatttgtactaacagcggtccttacacaatgctgaggaacaaccctcttttagaactgacaggaagcgttgaaagccagatatacatttatttttacttaggatgcgtcacgctcagcaaagctacaggaaaagggaacacttgggtagttacccttatttctagacctttcctcggtcatgatccagcatatttaaaagattttcataaatacatcattcttaattttgtcttgaaccagggttagcttgaagatgcagggaaaactaagaatttccgtgctagagacttgttaaggttagtggacactcccttgcaagtcaaacaatagtataattgcctcggatgtataatttctcaataaccccaccaccacccaaagactctttatcctccctttccaggttaggagagaagcacgcagagaggccagtactcctccaggtgacccaactgttttgtattatagatagaattcaaatttagcctaactccaagggctttgagtctttacttccaaactggaccaaaggacatttaaagcagaaccacaaagctttggtagattggagagggctggagggaacccaggaggcgagactgggatgataaaggctaggctctacaccctttgcacttacctaggttgttaataaccatgtgagagggagtggatcctttcaattacagcaagaatgagtaaaccggcagtgggctggagcctgtggtcctgtccaggaagacagaggcaggtccaggcggctttcatttggagagtcaggatggtttcttcctgtaataatcattttaaagcagtgtctgagagtctgtttcacattttccagtgaccatttacccttttccaaagttaaatctttcagctgggtctctttgccttgtttttcatatggtctcctgtgtttattttgggttgatgatcaaaattatgtttagtaagtgagggtgtgttgtacagtgatcaacagggtaagaagttggaaggaaggtagatttggggttgggagccagtgagttgagcacacctagcagaaagctgttcattcaaactaaacactaagcccctgcattggttgagcccagcattataaggactcaaggctcgtgggtttacctttgagactagtacatttgaagattaattactttatttcctggtctttgctgttaaattttgttaggaaatattgtctgatttttctgaattaaatatacaaccaaggacctttagggttcatcagaatatgtacccgaatcttctgtgtgtaagaccaggtacttgcctgggtcacccacttcagaatatgctgagcgcttgggtggaggtgagtttggtagagtttggtaatgattaccctgtattacggtgacatgcaggagagtttatttggctgatgtgatgtccagaaggtactgaagttccattgccatgagtgcaagcagcatttaggaaggggggctttaaggtaagaagccaagacttggacagttgacaatggtatgttttatacacagaaaagcaaaaatgtgtttaagtttatggaaaatacaagtacattcttataagagtttgtccctcagggaaaaaaaaaaaaaaaccagactcctatattgggcttctctgtctatgccttgctataataatgttaagaatttgaatgattctcttatcaggaagcagcacaatgttaatttatcttttttttttttaaacatgtgaacaataatactgatgccacaaagccctgtgttagattctttcttctgggggtggatggatggttggggtgctagggaaagacccaggcccctgcatgaatgagctcttcactgagtttacctcctcgctaggaaaggccctctgttctagaatggaagcatatttagtccaggccattgtcgtgggaagacaaatcccagggcctaggctggattccgagagcccagcctgtcttacccaggcccctttgatgcctgactcccgctcatatcattagagtccagcaacagctgcctcctgaagaacctgcgtaagtgggcactaacccacccgccacacagttcatccatttaaacgtgtttaaattcatgtaatcacccctagagtcagtttttatcactcgcaaaggaaaccctgggcacactagtaaccactcagttacctgttttttcccttctgaatttgtccacgctaggcgtttcatagaaatggagtcattctgtgattggcttggtaggatgctttgaagattcaccttgttataacaggtatcccgtatcattattccttttaactgctgaatattaattactccactatgtaggcatatcacatttcaaataggggaacatttgagttatttcttttttatgttcccaaactttgttatttattagactcacctccagtatgtcaaatatcgatgcccagactgtattctattcagtcaaaatctctagggatggctttaggcgttagtgctctgtgttaaggcatctcactagattccagagaggattaagaactagtaccttaggccctaactcagtacctggtgaactttggaggcatcctgtctgcagtgaatgttcaatacctaatgaagatttgggtgatgaccgtgttagcaacaggctttccccaaaagaaccagtaggacttttccatgacttttttcaggggtgtgaataacttacaataagattatttagaaatgacatgttaaaaagactgtgaagtgggggctagaaagatggctacatttttaagcgtacttactgttcttgaagatccaagttcagttcatcgcacctatatcaggtggcttacaactgcctataaccccagctccagaggacctgaagtctctgacttcccctggcaccttcatgcactagctatacacccacacaaaattttaagaggcagtgagagccaggagtgtggtggatccctcctgcagttccagctcctagggaggattgcagtcagtggtaaaacagcctggcctgcagcatagaaccctgtctccagacaaaccggaggagactggaatgttcctgctggggtgggtgttggatgtagattcctgtacacacttcattcctgtgctttttgtttcttttctgcaaagaaaaccctggcatgggcaagccaactccgctttttggttgtgcccgttagaggcaactttgtagtccagaccacaggaatcagtactgaagttgcccagaaggattttctgatttacacagttggaacgagaggctgacttgttggtgggtacactgcgtgtggggggctactgagtgtgaccactgcagctggcctctgccatcgcctggcacactcctgcctctcctgctcagggctgccaggcagagcaggttggcgttaccctagccattcccatagctccttaatggggtataatttaatcacctgtcaggaagttagtaaaagcttgtctcttgttgcttttaagattttgaagaatagtatcttatttttattcttaaaatacctgagccgggcgtggtggtgcacgcctagcacttgggaggcagagacaggcagatttctgagttcgaggccagcctggtctacagagtgagttccaggacagccagggctacacagagaaaccctgtctcaaaaaaaaaaaaaacaaataaaaaagacctgagatttggagtgggttagtacctgctgaattcattttgaggaaggccacgagtgttagggctgtgtgactgtgactaagtgactggcactctgaaagggggagttggaattttcctgtgtgtcagatctgacagtctttctgctctggtgtagcagggatttgtagcattgcacatggaagcagaagctaacctctgtccagcccctggcagtcggttgcaggggaagtggttggtgcctgctgtgagcagaggcttgcagagctgactccctgatggaatcaattgctctcgttacggttcttaagtgaccaggtttgttttgcagaactggacccaggggttgggtattttgtttgtttggttgtttttggtttttttgttgttgttttgttttcttgagacaggatgtcttacagtagcccaaattgtccttaaactcactaagacccaggtcctgcttcagctccctagtgctgggtttacaggtgtgcgctcgccacgcctggcaaggcagagaatctttgaatagagagtgcttgaagagtcatgaacttttgttgttgttaaaccattcaaatcttggtgatgaaaatcaagacatttttatctgcagtaggaaaaactgccaagtttagaaggttttatttttgctggtggcaattcccaatgaattacacattgaattacaaatgaattacagtgaaatacacattgaaagccactctcaatagtgttttacttcatgttgctgctaggagggaaacctgtaccaccaactcataattgttcctactggttcccaggctgagagtaggtctgctctagggacagtcccttgaaaatctctacctggcctgaagcagttgcttctgactaatccagggtcttgtccctgctgtgtagtggggcaggtgtggcccggcactttaactgtgtctcattgaccttgacaagtactgtcctctgtctccagggatgtgggtcaaaatggctccttaggaacaaacctgattttctcctgtcctggctctgctgaaagtccaaagttcaaggggtctgtgtcttgtgcttcgggtgtccaaagttcccttgataaggctgtggctgtaaagtgttgggtctgcgctgcaaaagacagtaacagagagaagagacaatcttggttttctggtaccaactcaccctccacctatgaaggtagccaatctctggtgtccctcagcgtgtcagggactgtagttttagaacctatgggtactaaacccctcagatgttcaaatcttccttgtaaaatacacatagcttttactctgtaagtcatccttaactccccaatactacctaatgcaggcttcataaagagttatatcgttagagggtaataaagcctacgtagtaacagataacttaacgaattctttcagtagagggttgcttgaaccgacaatgtaaaactattggatttggagggctaacgacactgctgcactggcaatttctagggcaggagttgaaactgaagttgttgatgttctgctagtagcagaccctggacatgttctgctactcttaacaaaaggactgacaagatggctcagttcgtaaagcactttgcttgtgacagaacagggaacacaaatttccctggtccctactctctggctcctggcttattacttcctcaccctttctgtctttctctaaaagtgaaagggtcttcttttgttagctgttggaggacgaaggactcttcacagtattgctagagagttcctgccaaaggggaactgtgtgcttctgcacccagcttctccatggagagccagagcaggcctgcggtaccagaaggccccaccccttgcttcccatacaagtctcctggctgcagagctgcagaacgttgagagatgattactgtcttgtttgtagggaaacccaccatctccttagtgaactgcttgtacctttattctcaagggatggaggcaaagggagagagcgcatagacagttctagagacccgcacatttccttgacataacttgcccagatcctttcccaccaaggacagtgtggcctggtttgctggaacactgatacaggaatctatagctgcaaggagttggccctaaaaagatgatttaatattattcttgtctagtgtgttggaaggcagagtttaaaactgggctatatttgtttctcctcttgttctttgcacttaaggaagtctgaataatggggttagagttcggaaagctgggcgtggctggctaggttgtggtgcctagggacgagcttagtgctttagagaagagcagcctgtgggtgcaaatccatcttttctgaccattgtgagggaaacagctcgagtcgtgaagaaaatacacccagtcagcaattagattgacggattcattagcttttactgcctccctgattgcaaacgtttgacttttgctttttaaacagactcactgtggtagcagtttagccttgaacgctctgtgaagcccaggatgacctcaagctcacagtcacatggcctcctcctcctgaacgctggggttccaggtctgcaccaagcggccagcatccagatcagagttctttgtgaacatttcaagatatggccctattctcctttaaaaaccagaattaaggctgaaagtctagcttgggaatagtgagagcacttgcctagtgtgcaccaggcctaaggctcaatgtctggtaacatcccctactcttcctaaaagatgtttttatcttgagaagagtgtgtgctaatatccttaggatgcaatacttacttcttatattcagtaatgtctaagtattgttataggagtggagctaaataatttttctgtgctcggtatttggtcataaatcatatgaaagaaatgtgcctttgttgtttcagtactttgaggtataacctcagatacctatgattaacaatgaaaatattggccaggtgtggtggcgcaagcctttaatcccagcactcgggaggcggaggcaggtagatttctgagtttgaggccagcctggtctacagagtgagttccaggacagccagggctatggagagagaacctgtctccaaaaaccaaaaagagtaattaccccagagccgccttcctgatggtagtggggaagggcaggactggacctgtcttgttgctcagtgcctcctgacctcaatgcctttcctccaaggggtctgtatacatttctcaagcctgctcctcccatgtttgcatgtgtgttatagtctacagccaaagtatagccctcactgtaaccccatcccgcctccctcctttgggatgggtgtgtgcgtctgacttgggccttgtacagtcagtgtgggttttgtggaggcaataagactgaagtagtagacaatccccaataccatttgcaggtctggaactgcactctcttttttaaaaaacatgtatacattttagggctgtagatttattttcctggttttatttttcattgctgacttttgagcacagaattatgataatcaattaaatttatacatcacctcattgatttttccaaactttttttttttaaacaacttttgggattttactccctggccttgactaggacaggattgtaccccacccctttttctttttcaccaagacaactgagcagaaatttggctgagcagtgttgtgggactatgatgtgatagttttaatcctaccttctgctttcgggcagctgcggccagcacagaaaccttgcaagctcactctgtatgtaagctttctggacaagggatggtcgccaaatttttagtttggatgtcttatacgaaagggaaatagtcttcattaaagttcgtatttcttttacctcggcctctcaaaaacaaacaaacaagcaaacaaacacccaaaagaaccaatgaaaatattggattctgtgactaaataatgtgtacatactcatttcacaaatatttatgaggtctacatccggacttgcatggcatgaagattgctttaatcttggagatagtggagcagttgttcttcaaggacatgagtttctgaaattgccctttctaattactctaaccctttggctcttggcactcctgaattacaggatgtgttttatatggtgattagtgtaatttcattaatgccgtctatccttcggggatgtagattcttaaggtgctttgcttttgtttaatagttgctcaggaaactcgaaaagggagtctcttacctacccttagtagcttgtgtgactggccattatagcattgtctacacacaaaatcagctgtgcttggcctcacagggcctgtgtttgcatgttctgttaggaactcatctgccagaatgctcagttccattgacaaaagtcaggggaacccagtcagacttggtcctttgctttcagaatgctttcatttcttctctgaaatggcatggagggagtgcctcttttggcccttctgaggtcaatgtgtatgtggtctgtagcaatcccttccttggcttccagtcatactaattattattattcaccaaagggaaaatgagaaacagacactatcctagcctcagctgtagtgtcttgtgctctccccagcacagggcatggtgctatgtgctttaacaaaatactttccttgggcacaattctattgcacccgtgatggaaggagcttcctttcagtgaagaactgaggcctagcgagaggccttatagacagactgttacagtgggttttcctgggttttattgtagatttggcctgtgatgtaaaatagcacacagatattcaacaagtggcacccccagttgtcatgctggggggatttggatgtgtagcaatgtgaggtttccattggccacttgaaaacaaaattccttgtccatttgtagcctcatcagagctcagacttcctgctctgttgtgttctttgccataagtcctgtttttgtggggcctttctctcacactcctgcccttattatatgccgcctgcctggaaactgaagtctcctggctaggccttttgtgaatctcaacccaacaaaggccacgtacactgcctaggttcccctgggagccctccaacccgttgctggaccctttgtcattaagtgggttgataagccattgaatagaacgacttccagacctgtctcttcacttgcacaagaatttcttactcagggattccggcctaggaacctagggtcctgtcagtacaactggatagagaagtttggcgagtgtctgcctttggaggaaggctaaatccaaatgcaaaccaaaccagcccatctcctgtcctctcctcacccccacccccctcaaggttttaaagtattgttttatactccctcttccaaaataactttggcttttaaagttagctgagcagtgaagagaaggaaaacctctggggaccctggaagcgcaatggcacagctgagaggcttttgcgtttgccactgtttgttgccatgcaggtgctggtgacaaacaagttatggcctcaccttctatttttcatgcagtggctaaacccagaaaaaggcactgctttcatagtcactgacatttgctccaggagatagatttattaatagtgttgctgccacaccccagcctgctcctttatactttaaagaggcacttacacactttcttcatatgaaagatcattttgagggaggaccggtgttgtcttggctttctgttgaattggaatccactgtgagggtagggtgggcgagtgggcatcgtcacctacacagtttacaacagagttgcccaaggcttctaagctgtagtgtgctgtctgtccgttgttcaaacagcgtccccaaagaagggggctgagaagtagatgcctgtgtcctacagtgtcactgtgcctgctgtggctctcactgtcacgatgggttgggtgtttgctggcaaaagtactaaagttccttgtgcttccatttccttactccagagtgatggttgcccacttggtggattgctgtgcgtccagacgaggcggtacaagttttggaaggaggtttctgagcacgcagaaagtgtgtgatcagaggtggctgctcttgttgcagtgcagtgtctactttatctggacttagaccatccccacgttgtaaccttccgttctcaaaacccagtgtgaccagtgtctcacacaactctatagtagatttttaatctgctttttatgtatatgggtgttttgcctgtatgtatttctgtgtaccatacatgtactcgatgccttcagagtccagaagagagcatcagattacagacagttgtgagttgccatataggttccatgaacagatccagcttctgtgtaagagcagtgagtgctcttaaccactggtttagccatctctccagtccctagtaatcctttttataggcccaaattgcattgtagtagtcagcaacaatagtgagtaccatgatgcactttcagatatatacatatgaaagtagttgaaatataatttctaagctcagggttaatttatgtctttattgggaacacagagcccttttacatgacgtgtttagtagccatggtaatcatctcatttgtaaattatgctattatggaataatatgaaaaactattgagtttagtcattaagagccctctttgtgattcagattcacaccagctctttggagtaattgctaatgatacctagagtagtttggaagggctaatgtccacagttgtagcctcgggaagttgttagccacacatttgcttagaggacacccgaggagggcatgggccatagtggggaccgctgcagggctgcgctgtccaccaccgcagccactagtcaccttgcagtctggaaatgtgatgagtgacagaaaccaagaggctggagctttagtgttaatgagcatgacatttataaacagcagaaacgacttttctggttaataagccttaggtagtcctctagctcaggaggaggctcggggctcctggtcctgcctttgtagggcagcattgtgcgctgtcttgtgggtaagattattgtgctctgtcacctttaatatcacaacaatactgttaacatgttaaaatgctattggaccaaattggattaaatacgttgttcaaattaaattcactgtgttgtttttgttattgtgtctgagctgcaaacaatatcagttacatatgttattcacattatatttcttatgaagttcctttagagcattctgtaatctaaaattagtgtgtatttttacattaaaatgaattttcaattgtagtttggacatgataaaatctgaaacacttagaggtttagacatcttccggtccagtcccaccctctttccggtgcagaaagcaaggcagaaggtttctatcaatcgatggtgcccagttccaggtagggcctgaaacctagtcatctttttcctgttacaaatagaaatttagtccttagaaaagacagcattgcaggtggaaaggaatgtggctgctgtccctgaccagtggaaagagtgtgttcagtaggtgttcactgtgtgtgtcattcctgggcagtgtgataacactttcacgaacagtaatgctcatattcccatactgtgtgtggccatccatgttggaagactccatactagttttcctacttttagtcttttcctcccaaagccagagatgttttgttttgcttttttttttttttttttttttcaggtaaagacacattgtttttttctttttttatttatttatttatttatttatttatttattatatgtaagtacactgtagctgtcttcagacactccagaagagggcgtcagatcttgttacagatggttgtgagccaccatgtggttgctgggatttgaactcctgaccttcgggagagcagtcgggtgctcttacccactgagccatctcaccagcccttgttttgcttttgagacagggtttctcttaagtagacttggctgtcctggaacttgctctgtagaccaggctggcttcaaattcagagatccacctgtctgcctactgcaccacctgtctgcctactgcaccacctgtctgcctactgcactctagatttaaaggttttgagcaggggatgctactataacctaactcaaagccatagatttaaaaacaaacaaacaaacaaacaaacagaaaacagcaacacactttaaaagcagacccatagcttgtgtccttaaggaaaaaaaagaatttgactgagtgtgtttagatagagttctgagatcacttaaaagtttaggcctttttgtgttgttctgatttcccaggcctgacctgagatcgtgaccagaacccgctcaggcgtggaggtaggcagctcgagccgtagacacagcccatgtgtgtctcgtgtcttctttctttcattaaccgtcacacagaggcataggaattacacgacataaagatgcaagtgaatgtttgtgacctctaggcacttgaatgttagagccagtgcccaagaagtgcctttctcaaggacgacaagggtattgcccaggtccccagtcttgggaagctgggggtgaacagtcagctttgtgttgctcttagtgggtatgtggcctgtgttgtccaattcgggcttttttgagtacacactagtttcaggctgtggtcaggttaccctagaggccaggccctagataggctgtggcaggggctgagggctgggaggctctcctgaagcatgctattcaaaccttctggtggtgaaagcatgcatgcctctatggaagggtgcagggtccctggaggccctgactagtcagatgtcagctgagtttttaataacaggattttacaggctgttattttagcttcacagataagtccacatagcagggtttgttacttggttttttgtttgtttttgcttttgcttttcccctactttgattggactgagtcttgctctgtagctcaggctgacttccaatttaccagcaatacttctttctgcccctgcattctgagtgcaggatggtgaggtgtgtgctagtaacctggcaacagtattgtcagtgttggtgttcagagaagtccataaaagttggtgatttttcttagtagaagaaactgtaatggaggggctggaaacatggctaagcagttatcttggagaggatccgtgtgtgagtcatagcacccacacagtggcttacaaccatccacaactccagtgccagaggatatgacacccactgctgacctcagcaggcatatcaagcatggacatggtgaatcatgtaaacaaaatgtgtgtaaagtaagttttaaaaggtttcaagaaattgtaaggagaaagtctgtctgatatttgtgtttggttgaccagatgtattctcctgtgttctgctcagtcacaaaaagcctgtcaccggttgtccacttagcattttgagccttggattactaatttatagccccagagttggctgtgatcgcacaaatcactgttagctttctttacagtcagttacaacctgttctaagtgtcagtcaatgaccaacagacagtcttagaaaggacatctttctagactttaaagaaccaatggatgggtcagcctggctggacttgtctcctgtcttctgtagcttgtcttcagcagtctgaggcttgcttgtgcttgctggttgtgcttgctgtgctggggtgttgctgctgataagacttcattcacctactcttccctttgtacactacatcctctggattttatccctgtggatgtgcaggcagctgaacaggagcttggctagagcattggtgggcatagactccagagagtttattcacactggagagatggctcagaagttaagaatgctgtctcttcttttagaggttctgagcccagttcccagcaaccacatggtggctcacaaccatctgtagtggaatctgaggccctcgcctggcatgcacatatacgcacacagaacactcatacataaataaactaaatttaaaacaaacctggatttctggaaaaacagtgagtactcttaactgctgagccatctctccattctcctataaaccgtgaacctgggggctggaaggatggctcagtgattaggagcgattgctgcacaattatgaggacctgagcttggaatccagcattcacataacaaactggcacggtctcgtgcatgactgtagccccagagtcttgagggaggattattggagctcactgatgctagcctgaccaaaaaccatgaactccagattcaagaagggaccctgacttaaagccgtaagacctggtgatgaagacaccttcctctggcctctactcccatgtgttggcatatgcacccacacacaaaaacatgaagtttttaaaaagcataaaagcacattaggtgtgggggctcccagtactcgagaggcagagaaaggtggatctagtctactaaaggccaatctagtctacggactgagttccaggacattaaagaaacctcgtctggggggctgagggtggggagccccttgaaaaggaatagtgaaatagaggtacatcctttttcctctgccagcatggtaacaacaacaacaacaaagaaccaatagagaagtagactagaggtagttttacagttctttgccctctgctgctgggcagttatctcacctttgcaaaagcagaggactgtctaggtgattccgacagccctctctgtagtggtattccatgactgtgcggtcccatgtgttcccatgtgatccgagtcacatgtaccaaaaggtccagatgtaaggaggaaggaaagctctgggggtgagagtttcccttgagctggagaactggaactttgcggggaagggggatgctcgcagttgagaacgagagaaaatattgccactgtcacgcagaaagaccaagaacacaaggttgcagctgggttgactttatatgctcttactgccttgttttctgttttgagacattcttgccctggttcgtgttgaccttgaactcagaactgttcttgctccagctgcctgagtcctgtgattacaggtgtgtgcctgacacctgttgctttcaaatactcactgagtcaggccttgggagtccagacttagcccttgtttatgttcatggtcgtgactgttgtgcgaagtggcagttactacttctgttgtgtctctgcctacttagtggcttttctctgtgctgccagaggtccttaatgctgctcctcatgtctcctaacaaacagcccttgcgttactggcacctcactgttcctgtgacctgtgtgaatgtattgttcagtggtagataaactaatgacccacttagtctgtacactaatcttgctgttcttgactaccacttgtgttactaccactttttggtaagagttttagccattagtgcatattacttttaagaaatattgcttgctcttgctgcctttgtggcaggtgcaggaaaattggactgacacagaggttagcatgcctttgtacagagacaatgtggaaatttgtgaggttttccttatattttacaggacccccccccccatccccccaatcatacttgctgggtggtgtcacacacttttaattccagcactcaggaggcacaggcaggtggatctcgcaagttcaaggacaaccagggttacactaaaaagccttgttttgggtggggtgggaatcatacttttaaaaagttcacagttttaaaaagttagcagaccctttggaaagtaccctaaaagtgtccggggctcattaaaaaggcttttttaaagtgttctctgtggtctaaatataattcagtacattaaattcatatataaaattcctccgcaccactgatagcagcatagccatgcctcaagagccagggtctttgtctgactgcacagttcttccctatccctcaggtctaggtggatgctcttgattgttgctatgtttacttaattgttaattggttagatccaaaagtgaccatgagtattaaataatttagtttggggaaccctgaaaatggataaaggagcttgaagcattgagaaatatcagcagtttctgtgaagagtctctgtgattcgaggcctccctccttcagctgacccatcagagaggtcaagggtggaggcagcaaggcgcagagttgcctgcctggtctcctgatttgtttcccctcaggtgaagtagatgaggaagatggaagcagtgttcctgaaggttcttttggtaatgatgtgtgtgtgttctaacagtaactgaagtgtgttcatcaagtgctttctctgtgtggcttgctcactcagaatgggcagagtccagcaactgtatcctaaggattgctgttctcctgacagagtaagggccaccctgcaccagcacagccagattgtaactcttgaaagccaagtgtgaaacttgtggagaagtcagagcttggtggtttctccaccaggtaggtggggttacccagggtttgaaaagtgaatgtccttggtgatttcattttgaccacagaacagctatgcctctggagaaagtcgggcttctgactgccttcactttccagctttgcgtagtcttgcatcatgttgcaggttatgggctgcgtaatgggtgagagttccagtaagctggccgggtcctatttcttagattgagtgagtcattcctaagaaccttgcttgagaacaggaagcagcccatggacgtttctgtgcatggtaatgtagcctgccaggctgaggaagcagacactttctagctcagaccaagtggaggatgtctccaggcctctggagtggtgctttcgtgaccggggctttaaccttgctgagtgatttgtatttggtacgaattcagaaatttttatgtggtgaaaatctctagttgttgattattgagataggatttctgtaggaggaaaacttgggttggctggtgttgagtattaatagtctgccaagtatatatgagttgtttaactaggtctttctaatattgctgaggtaacacacataaacagcaatagtgtacctgatttagatgactgtaaggccctctgtgaccctacactattctgtattttaattattccgtatattttaatcacctatttcatagtagtagcagaaagaattagaaaattaatccgtgaaaaccaaaagaacttggtgtggggctgactacagtgagccataggcctgtcttctgcctttggagtctttgttgaaaagcagatggcattatattgtctaccatgtaatgcagtgtgggacaggaaccttcgagaagtaaatgggcaaatatttagaaatgcaacagtcataagtaagatagatttaaaagacacatctgcctggagtcatttattactacaagtaatactgcaggtattaataaataaagtgtttatttattaggcagtaagaccacagagtagggctttgtaaatgaaggttaattatgcagctggttattcaactgttaaggtttgggcattccctcagtgcactcacagacgctgccagccctcccctgggtgactttcagactgtagaacatgagtcttgttttctatctggttttattcaaaaatacttaggcattgtctgttgacaggggagctaaaccaggtttactttctaggtgaataatatatattcagctgggcatcataggagatataggatgggcactgtagccaagtgttcttcactctcgatgttctagtaacgaatgtgtgcatgaagaagagaatgccgagaagcaaagggtaaactaaggtgggtatttggggtgtgcgtacaccttatgcaaccccagcatttgggagcttgagtgaggaggaggaggatgcatctgaggtcagcctgacctccatagtgagatccctaataaaagggggtggggggagaacaagctttcctatagagttaggagtaaagacccattttattctgtgctaaatgacaagtacagtttcttattgttagcggcttgttgagctactgtttttgtggtagttgaaagatggcatagtgggtaaaggtgcctgctcccaacctgatgatggccttagtgcctgagacacacatggtagagggagagaaacagctcctgcaggctgccctctgacctctatttatactctgtggcacatgtgtctggttcccacccctcctgctaccaccccaataaaaagtaataaaaatccgtactttaagatacaattttgccgggcgtggtggcgcacgcctttaatcccagcactcgggagtcagaggcaggtggatttctgagttcgaggccagcctggtctacaaagtgaggtccaggacagccaggtctatacagagaaaccctgtctcgaaaaaaaccaaaaaaaaaaaaaaaaaaaaaagatacaatttttaatttcaataatatgccaaggtctcagtttactgaagaactttattgtagggtgggaatcattttaaaatcttttgctaaatgtttgttcaaagactggcttgaaatataatatggcttcagtgttcaaggtctctgtttatccttgtgcagagatgtttatttcaaaatgccctgactttgttgtcaaactgtacccttccacgaggcctgtgatggattacccagacagcaaataattattacacattttgaatctaactttttgttggagcagatggtggtagaacatgaattgtccaacattctgcttccttctgtctcttgcgtaagctaagtttgtagtggaacttggagcacactcaggaatccataagtggcaggcagcatttgccccgtacaccacgaggctcaccctggcacttaggttacctacccttgggcagctttttccagtctaagaaaatatctgttggagtgctgtgctagctgttgtctgctttcgggtcgtcgtccccccgtcccccagactgtttatgtggccttccctcctgggagacccacacggtcagggtcggacagctagctgcttttcagaactttggcaagagcagtgttagtcctccttagatgcttctcttccccgctgtctgctgtcttgttcttgcttgttaggggctccaccctagcatttcctctgagatgctgttcaggtttcacaaagcagtggttcggggataggtctttgtggtgtaagtcatgcgccagtcacggggttccttacaggaaatgctgagtgctttgttcattgcagaaaatagcacttgtgctgtgggcctcccaggcagtgctttgggttaacagacttgtgtacagtatttcttcccagggtaatgctttgactgtttcatacagtctcatccagtctctgaagctaggtcattgtgacacacacttgtaatccaagctttggaaagctggggcaggaggattgctgtgagctcgaatccatcttgggcttcagtatgaaattttgtcttaagaggtgggaaaaggggggctggagagatggctcagaggttaagagcactggctgctcttccagaggtcctgagttcaattcccagcaacatggtggctcacaaccatctacaatgggatctgatgccttcttctggtgtgtctgaagacaactacagtgtactcatacatgacatgaatttttaaaaaaacaaaaaaaaaaaagagggaaaaaagggggctggagaggtggcttagcagttaagagcactgcctgctcttccagaggtcctgtgttcaattcccagcaaccacaaggtggttcacaaccatctgtaacggggtctgatgccaccttctggtgtgtctgaagagaacaatggtgtactcatatacataaagtaaatttaaaaatctttaaaaaaaaaaaaaggcgggggagaggtgggggaagcaagtgcaaggccctgggtttggtcatcacctctgaagaaaaaattacaaaagataaagtgtgccatgctcttgggcttgcaagatggctcagtaagagcactgactgctcttctgaagttcctaagttcaaatcccagcaaccacatagtgactcacagccacccataatgagatctgacgccctcttctggtacatctgaagacagcgacagtgtacttctgtataataataaataaatcttgggccagagcaaacagggactgagcgagcggggttggccggagtgagcagaggtcctaaaaattcaattcccaacaaccacatgaaggctcacaaccacctgtacagctacagtgtactcatacacataaaataaatagataaatcttaaaaaaaaaaaaaaaaaaaaagagggaaaaaatcaaatttcagacattttccttctgaaacttgtgtggaaatctaaaacagcaaaatgtgttgggcacaggaagaaactcactgttgctgcattcagataagaatgtctgaattcagacctatgaccagatcactctgaacatgggctggtgctatttgatgctaagcaggatcagcgctggcttgtactctgataggaagatgtgtgctgtttaggaatccaaagtataaaagttgcttaaaatcggcttgtttttactttttaaaacttataaggttaatcgtgtgtgtgtgtgtgtgtgtgtgtgtgtgtgtgtgtgtgtgtgtgtgtgtagaagctagaggtgtcagatttcctagagctggagttccgggcagttgtgagcagcgtcacgtgggtgccaggtcctccgggcagtgcatggtcttcactgctgaacctttcaccagctaggttttaaaaagcagttttctttttcttttgcacgctttatagcacagctctgaaagtgcagagaacttcccggactctatgaagcctgtgtgggtgccagacagggatcacactggatgtccctggcccactggaacaattagatgacagccaggtatgggtggcatatgcctgtaatcccagcactggggaaatgcaggcaagaagataggagtcaaggctatctttttggcacataataagtttgtgaccagcaacccatgaacaattaagtgtaaaaacctcttggtgaccttcctgctggaaatgcatgctaggctgtgggggccacagttttagctcagagctgttccaggtgagctgagccttcctgggccttgataaggatcccccaaggtgttcttttctgatcatgttacaggaaacgaaaaacaaagacagactgggatggtttaggatgtgcattgagggaaagtcatcctaggaaactgttggtgactgaatgggcctgtgactaatatacagcacaaggaggtgctcaccgctctccacatttcagctaccacctaaactccatgctctaatttatggatgtctcaactcccttaaaatacaaagacaagcagagcagtggtggcgcacgcctttaatcccagcacttgggaggcagaggcaggcggatttctgagttcaaggccagcctggtctgcagagtgagtgtcaggacagccagggctacacagagaaaccctgtttcaaaaaacaagaacaaagacaacaaaagtacatgttagcatgtttcagaggaggacctagaagcttcattgtgacaccatccatgatttgggagtaatattcagctagtctcagtgttacagcccaccactgttccatttgttacaaatgcattggcgtggagtttggtgcttacagcaggtctcccatcagtgaacatttgctaactctgacttattttatatttgtgaagaaatttgtctcctttggtaaccatctgtatgctggggcaggaaagaataatgaacacttctgaagttttgaagcattatcatttggtgggaacaagaaaaaataattgtgttaaaatcaactcttagcatgattgacactgatgattttagggtaagttccattagaaattgtcatcccgtcctttggctgagaagtccagcagactttgttttactccttgttagtacatagctatagctggaagctcggtgttagtggtggcacaccccagcccttggttagcagcgcaggagcattagtagttcaaggaagagggtggttagtggttcaaggccagcttgcgctacatgatcccatttcaaaaaacaaaaacgtgcctgggcagtggtggcgcatgcctttaatcctggcagaggcaggtagttctctgagtttgaaggcatcctggtctgcagagcaagttctaggacagccagggctacacagagaaaccctgtctcaactaaaacaaagcaaaccccccgaatattgttttttatttgcggatgtctgtttattgagacggggttcatggcagacatgagtgtctcagtgcatttgctatcctctcttctaaaggggcggggggggggtgcgctggagaggtggctcagcagttaagagcannnnnnnnnnnnnnnnnnnntggcttataaccatctatagtgagatctgatgccttcttcttgcctgtaggcagaccactgtatacataataaataaatcttaaaagggggggggaaggtgtgggagtcttaaaagtatggcaatatgcataagtttagctatttctgttgttttgcagtcatcagtgatccaaactaattcgaatgggtagctagatcttgttgcttttagcgaatatatattgagtgaatggaattgacagtcttctgtattctcattcagtttgtttgtgttcttccccatcagtgataacatgtagtgaactaacccgtgtggaccatcttaaccatggcttctccttccttttctgttttaaacataggacatggatttgattgacatcctttggaggcaagacatagatcttggagtaagtcgagaagtgtttgactttagtcagcgacagaaggactatgagctggaaaaacagaaaaaactcgaaaaggaaagacaagagcaactccagaaggaacaggagaaggcctttttcgctcagtttcaactggatgaagaaacaggagaattcctcccaattcagccggcccagcatatccagacagacaccagtggatccgccagctactcccaggtacactcgtcgtggtgggagctaaggaaaactctagtgagaaagcagactctctggagttgagttcttggtctgccatttactgtgtcttttgtgaggaggagaagttctcaaacttcgcttcttgataatcaggacacagatcacagggaggactttgtgagttacagaaacatcctctgtggtgatgaaacagcagcagaaatactgttgggagtaaaagaagtaggcattgctcattgtggtaggcagggccctgattgtatgggtaactgacttaactgtgttaagtatgattcccattttatattcccatgtctaaacaactaaagcatttgcccagaacactcagaaagaaatgaagggaggttattgcctagcacagagccctgggttcagtcccccagcgctgttcgttaaaggggagggactaataatttgaacacaatctggtttgaatctatgcaaatcgatttctgaaatgagaccataggttattttatgaacaagtcttattgctcgttgtgaccctgtgcttagaacatttcataaatgatgctctctgtgcctttccccttcctccaggttgcccacattcccaaacaagatgccttgtactttgaagactgtatgcagcttttggcagagacattcccatttgtagatgaccatgaggtataaaaatgtttgtttaacagcaaaactcccttatctgatattagttcctttcatgtgtctccaattaagagaagaaaagaaaattttagaaggaaaaaattgatcaaagaaattgtcaagtaaactgtatgagagctatacaatgcttaaaaataagacctgtatgggctggtgagatggctcagttggtaagagtacccgactgctcttccgaaggtccagagttcaaatcccagcaaccacaaggtggctcacaacatccataacaagatctgactccctcttctggagtgtctgaagacagctacagtgtacttacatataataaataaataaatctttaaaaaaaaaaaataaggcctgtaaactacaagtccattttactgtatagctggaaacaggaatcagaataattttccctggaaactggatatagatatataaaatattttgactagtaaagaacaactattaatcagcatttggattaaaaaatcttaatctgttgtttgaagcattctgctagatattatgggtacagattaagtcctaatgaatgtttttatccattttgaagtctgcctttaaatacatggagtgaaataacctaggagtgtattaatatggagtcactgggaggaggaaatgtttcattttataaaagcagcctgagagctgtaggccctgctgctgtctgttcttcatgccttggctctcactcacatgaatcaatgtcacgtcaatcttggctttcttcacttgcatttcagtcgcttgccctggatatccccagccacgctgaaagttcagtcttcactgcccctcatcaggcccagtccctcaatagctctctggaggcagccatgactgatttaagcagcatagagcaggacatggagcaagtttggcaggagctattttccattcccgaattacaggtaagagagctctaggagtgtgctgttttctgcgggcccttttaaattagtcatcctagttatttattatttacatgctacctcctcaaaggaagaaattgatggtgtatttaaattactcatgagagcttcccagactcacttaacacacatagtttttaggtaatcagactgaatatttctggataaattcattcaaagactgaaagctaatttagagttctgacaaagataaaatacttatctattgaaaaatgggagttgaaggaattattgaaaagaacaccttggatttgggggtagggaattgatctaaaatgcacttagcctctgctcatacaatgtgaccttctttcctagtgtcttaataccgaaaacaagcagctggctgatactaccgctgttcccagcccagaagccacactgacagaaatggacagcaattaccatttttactcatcgatctcctcgctggaaaaagaagtgggcaactgtggtccacatttccttcatggttttgaggattctttcagcagcatcctctccactgatgatgccagccagctgacctccttagactcaaatcccaccttaaacacagattttggcgatgaattttattctgctttcatagcagagcccagtgacggtggcagcatgccttcctccgctgccatcagtcagtcactctctgaactcctggacgggactattgaaggctgtgacctgtcactgtgtaaagctttcaacccgaagcacgctgaaggcacaatggaattcaatgactctgactctggcatttcactgaacacaagtcccagccgagcgtccccagagcactccgtggagtcttccatttacggagacccaccgcctgggttcagtgactcggaaatggaggagctagatagtgcccctggaagtgtcaaacagaacggccctaaagcacagccagcacattctcctggagacacagtacagcctctgtcaccagctcaagggcacagtgctcctatgcgtgaatcccaatgtgaaaatacaacaaaaaaagaagttcccgtgagtcctggtcatcaaaaagccccattcacaaaagacaaacattcaagccgcttagaggctcatctcacacgagatgagcttagggcaaaagctctccatattccattccctgtcgaaaaaatcattaacctccctgttgatgacttcaatgaaatgatgtccaaggagcaattcaatgaagctcagctcgcattgatccgagatatacgcaggagaggtaagaataaagtcgccgcccagaactgtaggaaaaggaagctggagaacattgtcgagctggagcaagacttgggccacttaaaagacgagagagaaaaactactcagagaaaagggagaaaacgacagaaacctccatctactgaaaaggcggctcagcaccttgtatcttgaagtcttcagcatgttacgtgatgaggatggaaagccttactctcccagtgaatactctctgcagcaaaccagagatggcaatgtgttccttgttcccaaaagcaagaagccagatacaaagaaaaactaggttcgggaggatggagccttttctgagctagtgtttgttttgtactgctaaaacttcctactgtgatgtgaaatgcagaaacactttataagtaactatgcagaattatagccaaagctagtatagcaataatatgaaactttacaaagcattaaagtctcaatgttgaatcagtttcattttaactctcaagttaatttcttaggcaccatttgggagagtttctgtttaagtgtaaatactacagaacttatttatactgttctcacttgttacagtcatagacttatatgacatctggctaaaagcaaactattgaaaactaaccagaccactatacttttttatatactgtatgaacaggaaatgacatttttatattaaattgtttagctcataaaaattaaaaggagctagcactaataaaagaatatcatgacttaaact

SEQ ID NO: 403 - DNA, 2258 bp, Mus Musculus
gtaactcttgaaagccaagtgtgaaacttgtggagaagtcagagcttggtggtttctccaccaggacatggatttgattgacatcctttggaggcaagacatagatcttggagtaagtcgagaagtgtttgactttagtcagcgacagaaggactatgagctggaaaaacagaaaaaactcgaaaaggaaagacaagagcaactccagaaggaacaggagaaggcctttttcgctcagtttcaactggatgaagaaacaggagaattcctcccaattcagccggcccagcatatccagacagacaccagtggatccgccagctactcccaggttgcccacattcccaaacaagatgccttgtactttgaagactgtatgcagcttttggcagagacattcccatttgtagatgaccatgagtcgcttgccctggatatccccagccacgctgaaagttcagtcttcactgcccctcatcaggcccagtccctcaatagctctctggaggcagccatgactgatttaagcagcatagagcaggacatggagcaagtttggcaggagctattttccattcccgaattacagtgtcttaataccgaaaacaagcagctggctgatactaccgctgttcccagcccagaagccacactgacagaaatggacagcaattaccatttttactcatcgatctcctcgctggaaaaagaagtgggcaactgtggtccacatttccttcatggttttgaggattctttcagcagcatcctctccactgatgatgccagccagctgacctccttagactcaaatcccaccttaaacacagattttggcgatgaattttattctgctttcatagcagagcccagtgacggtggcagcatgccttcctccgctgccatcagtcagtcactctctgaactcctggacgggactattgaaggctgtgacctgtcactgtgtaaagctttcaacccgaagcacgctgaaggcacaatggaattcaatgactctgactctggcatttcactgaacacaagtcccagccgagcgtccccagagcactccgtggagtcttccatttacggagacccaccgcctgggttcagtgactcggaaatggaggagctagatagtgcccctggaagtgtcaaacagaacggccctaaagcacagccagcacattctcctggagacacagtacagcctctgtcaccagctcaagggcacagtgctcctatgcgtgaatcccaatgtgaaaatacaacaaaaaaagaagttcccgtgagtcctggtcatcaaaaagccccattcacaaaagacaaacattcaagccgcttagaggctcatctcacacgagatgagcttagggcaaaagctctccatattccattccctgtcgaaaaaatcattaacctccctgttgatgacttcaatgaaatgatgtccaaggagcaattcaatgaagctcagctcgcattgatccgagatatacgcaggagaggtaagaataaagtcgccgcccagaactgtaggaaaaggaagctggagaacattgtcgagctggagcaagacttgggccacttaaaagacgagagagaaaaactactcagagaaaagggagaaaacgacagaaacctccatctactgaaaaggcggctcagcaccttgtatcttgaagtcttcagcatgttacgtgatgaggatggaaagccttactctcccagtgaatactctctgcagcaaaccagagatggcaatgtgttccttgttcccaaaagcaagaagccagatacaaagaaaaactaggttcgggaggatggagccttttctgagctagtgtttgttttgtactgctaaaacttcctactgtgatgtgaaatgcagaaacactttataagtaactatgcagaattatagccaaagctagtatagcaataatatgaaactttacaaagcattaaagtctcaatgttgaatcagtttcattttaactctcaagttaatttcttaggcaccatttgggagagtttctgtttaagtgtaaatactacagaacttatttatactgttctcacttgttacagtcatagacttatatgacatctggctaaaagcaaactattgaaaactaaccagaccactatacttttttatatactgtatgaacaggaaatgacatttttatattaaattgtttagctcataaaaattaaaaggagctagcactaataaaagaatatcatgacttaaa

SEQ ID NO: 404 - protein, 581 aa, Mus Musculus
MDLIDILWRQDIDLGVSREVFDFSQRQKDYELEKQKKLEKERQEQLQKEQEKAFFAQFQLDEETGEFLPIQPAQHIQTDTSGSASYSQVAHIPKQDALYFEDCMQLLAETFPFVDDHESLALDIPSHAESSVFTAPHQAQSLNSSLEAAMTDLSSIEQDMEQVWQELFSIPELQCLNTENKQLADTTAVPSPEATLTEMDSNYHFYSSISSLEKEVGNCGPHFLHGFEDSFSSILSTDDASQLTSLDSNPTLNTDFGDEFYSAFIAEPSDGGSMPSSAAISQSLSELLDGTIEGCDLSLCKAFNPKHAEGTMEFNDSDSGISLNTSPSRASPEHSVESSIYGDPPPGFSDSEMEELDSAPGSVKQNGPKAQPAHSPGDTVQPLSPAQGHSAPMRESQCENTTKKEVPVSPGHQKAPFTKDKHSSRLEAHLTRDELRAKALHIPFPVEKIINLPVDDFNEMMSKEQFNEAQLALIRDIRRRGKNKVAAQNCRKRKLENIVELEQDLGHLKDEREKLLREKGENDRNLHLLKRRLSTLYLEVFSMLRDEDGKPYSPSEYSLQQTRDGNVFLVPKSKKPDTKKN

SEQ ID NO: 405 - DNA, 784 bp, Mus Musculus
cgcctccatgcccttgtcctgcctctggcccttgcctcttgccctagccttttctccgcctttaagttcttgtcccgtccctaggtccttgttccgcccccagggggcgggggcggggcggactaaggctggcctgccactccagcgagcaggctatctcctagttctcggctgctcggactagccattgccgccgcctcacctctgctgcaagtagcctcgccgtcggggagccctaccacagcgtccgccctcagcatgatggacttggagttgccaccgccaggactacagtcccagcagagtgatggttgcccacttggtggattgctgtgcgtccagacgaggcggtacaagttttggaaggaggtttctgagcacgcagaaagtgtgtgatcagaggtggctgctcttgttgcagtgcagtgtctactttatctggacttagaccatccccacgttgtaaccttccgttctcaaaacccagtgtgaccagtgtctcacacaactctatagtagatttttaatctgctttttatgtatatgggtgttttgcctgtatgtatttctgtgtaccatacatgtactcgatgccttcagagtccagaagagagcatcagattacagacagttgtgagttgccatataggttccatgaacagatccagcttctgtgtaagagcagtgagtgctcttaaccactggtttagccatctctccagtccctagtaatcctttttataggcccaaattgcattgtagtagtcagcaacaatagtgagta

SEQ ID NO: 406 - protein, 45 aa, Mus Musculus
MMDLELPPPGLQSQQSDGCPLGGLLCVQTRRYKFWKEVSEHAESV

SEQ ID NO: 407 - DNA, 2499 bp, Mus Musculus
cgcctccatgcccttgtcctgcctctggcccttgcctcttgccctagccttttctccgcctttaagttcttgtcccgtccctaggtccttgttccgcccccagggggcgggggcggggcggactaaggctggcctgccactccagcgagcaggctatctcctagttctcggctgctcggactagccattgccgccgcctcacctctgctgcaagtagcctcgccgtcggggagccctaccacagcgtccgccctcagcatgatggacttggagttgccaccgccaggactacagtcccagcaggacatggatttgattgacatcctttggaggcaagacatagatcttggagtaagtcgagaagtgtttgactttagtcagcgacagaaggactatgagctggaaaaacagaaaaaactcgaaaaggaaagacaagagcaactccagaaggaacaggagaaggcctttttcgctcagtttcaactggatgaagaaacaggagaattcctcccaattcagccggcccagcatatccagacagacaccagtggatccgccagctactcccaggttgcccacattcccaaacaagatgccttgtactttgaagactgtatgcagcttttggcagagacattcccatttgtagatgaccatgagtcgcttgccctggatatccccagccacgctgaaagttcagtcttcactgcccctcatcaggcccagtccctcaatagctctctggaggcagccatgactgatttaagcagcatagagcaggacatggagcaagtttggcaggagctattttccattcccgaattacagtgtcttaataccgaaaacaagcagctggctgatactaccgctgttcccagcccagaagccacactgacagaaatggacagcaattaccatttttactcatcgatctcctcgctggaaaaagaagtgggcaactgtggtccacatttccttcatggttttgaggattctttcagcagcatcctctccactgatgatgccagccagctgacctccttagactcaaatcccaccttaaacacagattttggcgatgaattttattctgctttcatagcagagcccagtgacggtggcagcatgccttcctccgctgccatcagtcagtcactctctgaactcctggacgggactattgaaggctgtgacctgtcactgtgtaaagctttcaacccgaagcacgctgaaggcacaatggaattcaatgactctgactctggcatttcactgaacacaagtcccagccgagcgtccccagagcactccgtggagtcttccatttacggagacccaccgcctgggttcagtgactcggaaatggaggagctagatagtgcccctggaagtgtcaaacagaacggccctaaagcacagccagcacattctcctggagacacagtacagcctctgtcaccagctcaagggcacagtgctcctatgcgtgaatcccaatgtgaaaatacaacaaaaaaagaagttcccgtgagtcctggtcatcaaaaagccccattcacaaaagacaaacattcaagccgcttagaggctcatctcacacgagatgagcttagggcaaaagctctccatattccattccctgtcgaaaaaatcattaacctccctgttgatgacttcaatgaaatgatgtccaaggagcaattcaatgaagctcagctcgcattgatccgagatatacgcaggagaggtaagaataaagtcgccgcccagaactgtaggaaaaggaagctggagaacattgtcgagctggagcaagacttgggccacttaaaagacgagagagaaaaactactcagagaaaagggagaaaacgacagaaacctccatctactgaaaaggcggctcagcaccttgtatcttgaagtcttcagcatgttacgtgatgaggatggaaagccttactctcccagtgaatactctctgcagcaaaccagagatggcaatgtgttccttgttcccaaaagcaagaagccagatacaaagaaaaactaggttcgggaggatggagccttttctgagctagtgtttgttttgtactgctaaaacttcctactgtgatgtgaaatgcagaaacactttataagtaactatgcagaattatagccaaagctagtatagcaataatatgaaactttacaaagcattaaagtctcaatgttgaatcagtttcattttaactctcaagttaatttcttaggcaccatttgggagagtttctgtttaagtgtaaatactacagaacttatttatactgttctcacttgttacagtcatagacttatatgacatctggctaaaagcaaactattgaaaactaaccagaccactatacttttttatatactgtatgaacaggaaatgacatttttatattaaattgtttagctcataaaaattaaaaggagctagcactaataaaagaatatcatgacttaaact

SEQ ID NO: 408 - protein, 597 aa, Mus Musculus
MMDLELPPPGLQSQQDMDLIDILWRQDIDLGVSREVFDFSQRQKDYELEKQKKLEKERQEQLQKEQEKAFFAQFQLDEETGEFLPIQPAQHIQTDTSGSASYSQVAHIPKQDALYFEDCMQLLAETFPFVDDHESLALDIPSHAESSVFTAPHQAQSLNSSLEAAMTDLSSIEQDMEQVWQELFSIPELQCLNTENKQLADTTAVPSPEATLTEMDSNYHFYSSISSLEKEVGNCGPHFLHGFEDSFSSILSTDDASQLTSLDSNPTLNTDFGDEFYSAFIAEPSDGGSMPSSAAISQSLSELLDGTIEGCDLSLCKAFNPKHAEGTMEFNDSDSGISLNTSPSRASPEHSVESSIYGDPPPGFSDSEMEELDSAPGSVKQNGPKAQPAHSPGDTVQPLSPAQGHSAPMRESQCENTTKKEVPVSPGHQKAPFTKDKHSSRLEAHLTRDELRAKALHIPFPVEKIINLPVDDFNEMMSKEQFNEAQLALIRDIRRRGKNKVAAQNCRKRKLENIVELEQDLGHLKDEREKLLREKGENDRNLHLLKRRLSTLYLEVFSMLRDEDGKPYSPSEYSLQQTRDGNVFLVPKSKKPDTKKN

SEQ ID NO: 409 - DNA, 157184 bp, Mus Musculus
  misc_feature (1)...(157184): n = A,T,C or G
cctgttctttccttttggccgggcaatcagtgtgaacagaggcgcgttccctgaaagagtcccggtagcctcgtggaagccttctgacatgaccagcagacagcatcactaccaaggctgctcggggtttaagccctgcttctaaagtgccatgtcctgcaaagaaagtccccatgtgggtgcttccaccaccactgtcagctctgtagccgtgcacgctggggactccaagatcgtgatcgccgttgtcaaggtaaactcacagcttgctttcctctgtgtggctggggggctcttggcggaatggctgagagcacgggaggataatgcagagcagatgacaaataacaagtgatcttcgccacttaaatccgtgacagaggactgctaagttccaacaagttggcagctgcttttcagggtaaaacgcctctagagcgccttccaacaaactttactgtgtactttcagtttggtccttacaggcgaggcgcatgtgatgaaggttgaggaattccaggagagttgggtggccaggacagtgcctgagatttctgagtggctgtgatggagaatggggaggcaggtcagagtggggcactgtcctgagcttgagagaactggatgcaccagaagcctcccagaaccggttttcactggtaaaggcaacgctaaatacttctcccactgtagggggatggagactgccacagactacttattaaactgcctctccctcttgagaaaaggaaagtgcagtgactcgggccttaactgtgtgttttatgtctaattgttttatgtctaattgtgcaaagatggccacacattattttgggttgtacgaggctcccatgattttttttttttcctctgactgaaatcatcatgaaagatcctctggactataagcttgctctttagacactatgccacccaaataattcaggtttaatgaaagcaaacctggtaaaacaaaacgacaaacaaacaaatacctggctacaaggcctattggatttacatgctgcaaaattgtatagtagcatgaagctgtgtaggagaaaagccgagcttgacattgagcaaagcaattctctgaagaggcatggaatgcagggtcctgctcaaggccttagctgggtgggggtgggggtggggggttctcagtactgggagacttctgcacaacaaataggacttcagctccactccccatcctgtcctcagcagaggtgtgagtgggaatgacaaggaccatggcttccccagtgcaatcaggtcacttgcacacgatttaaagacgctttgggcaacatgtagattccagcagggatggaagagaagcaaatctaggacttttttgttttttagtaaacattactttttctcaaacttaaaacattcatagagtagacggagtcacaatacttaaacaacaacctatgagatagtcagaggtacaacgaacatacaaactttaacaacaatatagaaaagtcttttaagctggattctgtttctcagaaaaaccactcacggtcccctctccagctcccttccccactgccatctccaaagaaaaggcacttcagcctcttcagagagcaaagtttgtattgatgggcagggaaagcccaggtctggtccatagtgaagttccaccccgctctacctctgtgaagtgtccctctctgtctagagatgttttgtgtgaattcttccggtgatggtgaagaactgatcaccatctaacgcacacacagcacacatttgtcatttgggagtttaaagaattcaaacctgctctccatgagaaaacgtgttctagggataaaagaaggacccggcacaggtttgcatcagacctgttgcatttcaacacggcagaccatccccgtggaaggagaaagtgttcatagtgtaactggaaattaaaattacaaggtgggaaaaggagaagggggagagagaataaaagttcacttcacattttgtttttagtgtggcaaatgggtacgactccaactggctgaatcgcagcccaatctcctcgaaattgggagcagtcaagatgaaaccaaaaaactccttcacgatcatgagctgcttctggccaagcttaaggtaagagcctctgagtcgaagcaaagtcaacactccaaagtaaggtgagaccggttctctccttcctctggtcccgctgctctgacttgctttggccattttaattcagtgctgttagcgaatggaaaaaccactgctgtcacgcgcaagcatcagcctaggaaagaaatatcaaggacgggacaaacagctcagttggtccttgcctttcgaacatgaccacctgggttggatccctagagtccatgggaaacaggcaggcaggccaggcacagtagcacaggaaatgggaggttccctgaagtctgctgacaggctggcccagcctaattggtgagctacctaccagtgagagatgccatctcaaacgatgtggctgtacccttcaggatgttacccaagttgttttctggcctccacaagaacacacacaaaggcaggcagacacacggacacgcatgcatgcccaataaaatacaaaacaagttgcatttttaaagttgtcctacatgcaatagaaaatactgaggcacaatatttcaccgtcttttcagtaggagaacctctccactggccatcccggtggaaacaaactccactaccttgtcattccatgcattaacacacaacatcagctctaccttttctgttgctaaagcaaccttctgataagcataatgtagacaaatcattttttaaaatatctgattttatgcttagtattaagagttattgaaaccagatgacattattagtaaaattagacccaacaaattgtagttacttaagaatgtaaagttaacactgatttgggatgccgcgtaagaaacaaagccagctacatcatttgtgagattccgagcaaggtaaaaatgtgcagacccttgttctaaaagctgtcatagtgcatttcattctgtctttaatatctgtctgctttgggtactagcgtacaggacacatgggtgagtgcaggccatgaatgtggggtatcacttaattcacacagtgacctctacagggagccatgggggggggagtggagagagagagagagagagagagagagagagagaatggctttctgtaccatgagatttcagatgccagcatttggttcatggtctgtgggattcacttagagaacacagctgaaagaaatgtccttaacctttcaaagacaatgacaggtggagtgtgaaatcccatgttgccttcccctgagcagggcagaaggatgcagctagttctctgtgtcgtgagctgcacatgcaagcaagtacacatctttgttaagatcaaagaggcttgatgaagatgcagagtcctaaaatggtcaggatgctctgagatgttagacttaaatagtactggcttctctgtgtttctaggctgaaacacatggttgatttctaactcaaagtcaggtctaaactgcatccagtttatagactgtggggaaagtaattaattgggtaaaactgactgggaggatgatagatgaaccaatatcgaagacagcttctagaacctgatacttactcccttgtgtgacaactccttactcttgtgtctgatctgagctgtcattccagggagcaggccctggtcatcacgaagtcttgcgtgtattgacaagaaataacaccaaaacaaaacaccattataatgtgaaagaacactgggccaggaatcaaaagacctttgtgtggctttagtcgtgtcataaactaacgtaacttgacaaataattcaaagtcttcctgttacaaaaaagcttcaatacattcttgaacctactgttctatgaatcacagaaacccagtaccgttccccgttcattcctaaggtttgcttcccacagtccatgggtccccatctcctttctatgcacctgccaacattcgtgggaggtagtctggacctaaagctacattcctttctcagttcccactaagccatgctgcctggtactttccagttcactgatgaatcatcaatggtggctcgtagcagattgggcctctggggtctatggcttttcatgtctcatatcttgagaaaacactataagacatacttccttagatgtaccaatgctcttacttgatagctgaaagcaccctggatctcagctggaaataggggtttcatttaacaggttctgtctgcctttcggggcatttgggggctctagattctaaatatctggttcttttgggccagactccaggctgtggatgagctacctaagtcttctgagcgttaggctttttatctgcataaggagagaggagatcagagacgtgtatctgttggatttttatcactatgtgccatgaaatctggagtcatttcgatctcactgcaaatgggtctaaaatgtaagctctcagatgaaaacccattttggctttacctatggttctagtcataggctctgaatagccatctctcatactgtccctttcccatctgtttgctaggaacctagccatctcagccccctgagttgtttaattatcaggcccatctttcaaactacactgctatttaaatttttgtttaatgttttttaaaaagagagaagggaaattgtcaaggagtttggattctatttcagatttgccaacttaaaaataatgggaattgagtctctcaaatggatcccaactaattgactacttattatgccagcagggccatcagcacttaacctgtggcagaaaattgttggtatcaagctaattgtaatatgaggttttcaaaggaaaaggaagttagtagttcaagaagccaatcatatttaatatttggcgtcattctagtcctttcccagtgtataggacctggcagtatgttccaattacagagaaaaggattctgggaggggttctgggaggctgtaggagtcaagagggaagccctttctggtcgatcgtaacactcactctctccagtgagggtatatatttgaaaaattagggtaataacagttacctttacacttccaaaaagaagaactgggaagacaaatgtaatgctgtatggaagtgtgtgctgcctttaagaaggaaaatggcataataattatgctaatgatgaatatatcagactaatgtgaacatttactagaaaagctattttgtgccttccattaaaaattatctcaaaccctcacagggaagaataagaggataatgttgggaacacatgattttccatagggtttttaatgcttcggatgtctttgccctgagggattttattttgccttcagctatgtacttaagcatctctctggagtatccagaggaaaacactccccagtttccagtgaaggaaacaatcaagtggaaaaggtttaagtcccagggcttcgagattcctacactgcactgaattatttccaatgagaaagaagacatccaggaaggaaaagaggtaaagacctgcctgggctactattgactttgttcccccatgtagactcagagtggtcgacggcagaaatgaaggggtggagggtcctttgggatgttgcttaggatgctgctatcctcagcatctaagtgtccaaaggaatgctatggtttcaagtgactcttgggcatcagctccttgttaagggtgttggacacttcggagagattacaaaccaccacccactttacctcttatttgactctcagcagtctagtgttttcctgcttcagatgagatctctggcccagttggctaatatttatcctatttctgattgctgatctagaaactagacatgctgtgaatatagcatctgaatagtaaagccaaaatcctcatattaaaatttgccttgaacaagggatagtgtgaattactgcaattaagctatagaatttgctcagaatgcatttaaaagtgttttattgcaccaaactataaacaatataaagtttaccatcttaaccacttatatgagtacaattcagtagcactgaatacattcagagtatacaaatatcagctgtgtattttttcaaaagttatatcaaacagaaactctgtatctcctaagaaataattattgtctttgcttccagtgtagtctatttttcctttctatgaatttgcctgttctagtcaccaaatataaatggaatactgtctttaacttttttgcttggcttttttctactcatatgatatttgcatgtattttgaacaagaatttcacttcttcttgaataatgaataacaatgaatgacaccaatacattgtaatagttgcatatcccttatctgaaatgcttggaccagatatgttccagcttttcaattcttaggattttggaatatttgtatatgtgcaatgagatatcttgagtattgaacccaagtatgtatacaaaaattcaacatatttcagatataccttatacatgtagaataaaggtgatttgggtgtatctttcagtatgcctgcatttagactatggcctatggtatgagtccagggatggaattttccaactgttatctcatggctgtgctcaaaagtttttaattgagggctggagagatggctcaatggttaagagcactgactgctcttccagagatcctgagttcaattaccagaaaccacatggtggctcacaaccatcggtaatagggtctgatgccctcttctggtatgtctgaagacagtgacagtatactcatatacattaaataaataataaatcttttttaaaaagttttcaattatggagtagtatttggactggttcgttttattgttaacttgacacaaactaaactcatctggaaaaagggaactttaactgagaaaactacctttcagattggcctgtcagcaagtctatgggtgatttactcgattaatgattgatttggggtagactagcttgtgggtggtaccattcctgggacacggtccttggttgaataagaaagcagggtgagcaagccatgaagagcagttgataagcagtgtccctctgtggcctctcagtaagttcctacctccagactcctgccttaactacttgccatgacttccctccatgatggatagtaagctaggtatacccttcctccccaaagctggtcatggtgtttatcatagtgacagaaaggaatctaggagtgtgtgtgtgtgtgtgtgtgtgtgtgtgtatgtggatatgtgtgcaagtatacaaacatatgtgatctatgcttgtggcaacagagtttgtcattaggtgccttcctccattactctccgtgttagtttttgaggcagggtctctcactgaccctatagctcattgatttggctaggctagctggccaatgagttcagggacccatctgtgtctacttcccagcaccagagttatagacataagtcactgtgcttgcttttacgtgagtactggaactttgaactcatgtcttaatccttgctcagcaggcactttaccaactgaactctttctccaatcccaaattttgaagtacttttgatttcagagtttaggatgagggatgttcaacttgtaagacttaattggactgtttcctttctgtgttttgtaaattgtgctgcaatcaacactgatactagtgcttgcttggaacttgtaactctagttctttctggctgatgagtagcagcaccattgctggattgtatggcctttccatgcttaggttctgaggaaggaacactaaaatgtttcccctagtagaaaataagtagtttggatgatgcaatggttgatttttaaatgtcagcttgccacagtggaggatcacttgagtagagagccttaattcaaggattatctccaggttggtctttgggtgtttatagggaattgccttgattccctttatcaatagatgtgagaagactcaccccaaatgtgggtggcatctcctagtagcagcagagtagaaacaaagatatggaagaaggaagagtatttgctttttgctcagttgatcttgcctctcatctatttatttaccctgttgctgctgtttctaattccttagctgatgttagaaccagcttttccgggaacccagcagtcccaatctagtgccaaaggcctgaaggattgctggagagcttcaggtcctctatccaccttggaatcctgaaaagctggttctaacttagggaggcttctattgacttttctgctttccgttctagcaaagtgagaagaatgtgctacctggctggagagatgtgggagaaaggagtggccactgttggggaatgaagagctcttctgaggcccatggcgagctacaagctctctcctttctctgctgctgctgaccaggccaggcatctccacctgacagatgcagactatagttcagtccatgagggctgtgtccctattctaattctttcaggctggttccgaggtggggcccagattttggaggtgggagaagaaagccagaacagtcttgccttccagtttccctttcccattagtgagaataaatatcttgatccatacttgattttgatgttaatctcccagtcaatacagaacattaaagggagctggccagtgggcttgtgcctcggtgttctggtcatggaaagcatctggtttatgtttcagtgatcattttgaatgagatcaatgagataaggcagagacaaggcagaagttctggagaacttttcttaagttttgctgttaagacacttctctactaaaaagcatcaacaaaacttctcacaaccatgaaacactgaaatttcctggtgacattcatcatctcactgacaataggctagtcttcaggttgtttccttcctgagatattcgattccagtgaacaagatgtgctacagagtgactcaggcagctagttttgagtagtattctttagagctagaaaatgccatgggtaatctggtaaaatgctgttcttatatgtagaagggagagattatcttagtccatttgtgctagtgaacaaaataccgcagccagattaatttataaagaacagaaatatatttttaacagttaaagagaacctgagttctgctgccaagatggtgccttactgtggcaccatccaaaggacaagagaattgtgtcttcataggagagaagggggaaggcaaaacacgatggcatggtctcttcttcagacacctttcccggtattgacattaacccatctacagcggaaacttcatggcctaccctcttctaaaagggtccagttcctactactattgcatgaaggttaatgtttccaacatgtgaatttaaatttgagggaacacattcaagccatagcagaaatgctaatttagtaggtcctagagagtccatgacttgttcctgtgaagcaggaattgaaagaatatccattattgataaaatattgacgtgagcgcattttttgaagtttagaaattatatagagagacaattttgtagacacagagatgaaagagttcttggttcaagagtaaacattgggatcccaggcaatagctggagggcttatggagaacatgaggcccaagcatccatgtctgcatatctttatgtcctgagaaattaaacgaccctgattcagtaagaaggagaggtctcatttctgtagaaaacagaccatgtctgggttatagcagatactgacatcccttctgaggactctgggaagatctagaccatagcaagattgtggaagactagaaatcctttaaagtacccagccctcttctgatggcctgtggcccttctttcctgggtatgtagactgttcccctgccttgggaaacacaatatagcatattgttgtgagggtcccaacttcaagagactgactatatttgtgtccatgatttacatggacattgtgctccatgtcatagaactgtgacacttagtatgtactccacagggaagagatctcatcagccctgtagaggcccaaacagcaatgtcactggctcctgcgcatgagatctgttgatatcccagtgaacaagcaagtgatttgccagccatgtgagggactctccagccctagatgggtcctcaccatgtctctgtggagtccagaaagccttccttgtctcctttcctaactgggcaaatcaatgagtgctttaggcaacctgaattgggggtggcttatggcatagcaacaaagaatgaggccaaagcataccagcagccatcaacatcttctaaagacaatcaaaagtagcacacatgcatgaataatcacaagcagaagaaaatgagaatttttataaagaagcagttgagaaatatgaccagacttctctcaaacagaagctggtatggacgtactattgagggtaaagtgtacttctgagatttgtatgattcatttcttgaaggataaatggatgagcgtgcatccaaacaaagattttatctataatgacacttgggtgtttggtgtacatcccgctacagcttcgtgatcaagaggggaagatttataattataactctgcacacagagatatgtgcaaaatattatatgcagaaggaggattgattctgtcagggaaatcagataacggttgatggagaagacagttggtactgcctaggaagtgcgtttgagtgattgagataccgcaggcaaattcaaagggcaaatcagggagtgggcaagaaatatttgtgatgtatatgacaattaaaggtgtgtgtgtgtgtgtgtgtgtgtgtgtgagagagagagagagagagagagagagagagagacagacgacagagacagaaacagagacagagagacagagagagacagagagacatgcattttatgtgtatatggtatacatgtataattgttcatgtgtatggatgtggtcacacagaagccacagcatgcacgtagaggtcagaggataatcttgggtgtcatttctcaccttctaccttatttgagacagatcccttgtctttcactgctatgtaagtcaggttacctggcttatatactgggcattctgctgtctctgcctccagtctttgtgtaggaccttagacttgatatatatatgtgctctactgtgcctggctggatttcacataggttctgggatcccagctcaggttgtcaggcttgttccataaatgcttcatgtacttctccatctccttcatcacaactagattttttgaggccataaccttacagcctgtgacccataaagtacttatttaaaagacagccttctggaaaaaatgtaatcttcaaccaatgaaagtagaatccatagctcttattggcaatgacagacagcctgttggtctttgatttggaaagtcaggatggaatctgacagatccagaagtagagatgcacttgtgatgcagagagcgggtggtagaacatgacatgtcatctccgctttccatcttcgatacgctgggtttcattacttgtagggtagcaatgtggctttcagactctagctagatggtgacaagtctttctgtttaggaaaaaaaatcccagtatgcattctgtgtaactgaaaatgaagggattctttgttctgttttgttcgttacaatccctgcctaattagcattagctcaaatgcatctttgactttaatatgtaatagcatataaatgtgccaagctcaaaggatcttaaaatgacttggctctcattcatttgacaaatctatctagccgttagtcatcaggagactaagatgagctacacagttagccctgacttctaaattacctgcacctcccaacttctgtactgtagcatcgtggcatgtggacttctgctctccttcccaaagctacccaattactcctcagaattcttggcaaatgttcattctatcagaggattacaaacacgttagtggaaataatatagagagtgttctttctgacttgtttggacttggaaccagtaataaagatgttctaggctcactcaagtgcttggggtgaattgacaccattccccccgcccccaaacctgtggcattcccacgtactggagaaacacagtagtggggagagcatggctcagtggataaagttaaactctggcttttcaggccccactgtatgtttcatccactaacttgaactaggaaagggagacttcaaagaaggccactccatagttcgtatcatccagatgatgatctgattgtcttgaaagaaagctgaataccttgcctgtcattagactggaaactgaagaacttgatacctcagattcaattttataaaatgatttttttcctgtgaagagtcaactcaaagcacatcctgagttttccataattggaactagagaaatctaaagtacccaaggctattgcttactgctttctgagtgcctgagtgtttttggtccagtggtcccataagctattaaacttttattaatgtgttgaaaagaaaatgctttgctagagcgccacacttcttagagcagagataaataggaatatataatataaactgcaagggccagccacatttgtaactcaaagtgtggaggaggcatgtgtaaatttgggggagttaagtgcttacctaggaaagaataaataccctaaattaatctaaacttaagagactagaaaaaataagagcaaattaaagccaaagcaagcagagtggggaaactacaaagagcagcgatcgatacaattgaaaacagaaacacaataggaaaatcaatacggccaaagccagctctttgaaaaggtcaattaaattgatgaacctcttgccagaccaagaaggaaaaagagagaaggcaaaaattaccaatattagacatgaagaataggtcttagtatgaatcccgtagtcattaaatgtataatgagaaagtgccaagaacatctgtctgtacatgaattcaacagcttagatgaaatgaactgagtccttgaaagtataaattaccaaacccaatcaaacagcaaaataaaaagaaacaagtgaaagtaatttaataatatgcttaatttactccaatatacaccaaatattaccatttagcaagtaatcattttaaaattacagatgaaatattgcatcagaccagtgagatactgtgactttaacccatcccttgcaaatgattagtggtcaccatgtgtccagtatggtagatttggagaataaaggagtctacatcttgggatttctttgccttgttttctagctcaagggggaacttaggaagagtcagtgccatgtaagtcctgaaaagagaaacagtggcctgatatttctgtcaggggaactaaattttaaaagaaaaaaatgttttctagtggtagatttttataactagttaagcaatgttattgaacatggttgtaagaggaataaaaatatttttctgatgcaatacttctgagaactgttatgtgaatatgtgtgaatgtgtttgtagctgtggctgagaagcatatgaatgtgtgttgtgatggcttgtatatgctccacccagggagtggcacttctagagagtgtggtcctgttggaggaggtgtggcctttttggagtaggtgtgtcactgtggatgtggactttaaaaccctcatcctagctgcctggaagtcagtattctgcaacagccttcagatgaagatgtagaactctcagctcctcctgtaccatgcctacctggatgctgccatgttcctgtcttgattataaaggaattcttgttctttacaagacttgccttggtcacggtgtctcttcacagcactaaaaccctaactaagacatgtgtgaatgtatttgcgtgtatgtttcctaactgtttgaaactgattttgctttaaacagtaatgtctttcaaactactggagtgatggctcagtggttaaagggacaactcttttagaggacttgtgttaggttcccagcacacacatccatgcagttaactctagattcaagggatctgatgcctctggtctctgttgacacctgcactcatctacacatacccacgcagagataatcacacacacacacacacacacacacacacacacacacacacctagaattataatttaaaatttttaaaggaaatagtttgaattcatgaaggtaaaactgtgtgttactactgtttgaaaagctaccagtagacgaccataattaaatggcgagtggcctggttcccacttctggcagcatcactgcacatttcattaatacttgtatgtgtaattaatttgttgtctgttgttcattcatggctcacatattgctcagtggatttctcatggttacattatgtaatgatgataacatcagagactaaatgccattcagattctaaaaataactgtaatcgtttcttaaatatgtttttgcttaattgggctcaatgttggctaacagatcattaaaggttttgttacttgagtgatgggtattgtaatgactagtgaggatgtgctttctgtggttaaataccttggagatttctgtatttcttaattcatttatatatatttcacatctaactagttttcagtcatgtcatagataatgatccaaatgttgaatataaacaaggggagtagtgcaaatacggtgtctaatagctggcgtgttccatctatttttcttttcttttaattacatgtaaaaatagggcaaaggttgaaatagtttgtgaaatctctcaaccaggctggcaacagcatcatctgaatgcctcagaagtgagccggtcctcagatccaagccctgagctatgtacctggaaaaagtgatggagagttaagattaggaagtcaaagaatttatgctggattttctttttcttctaagagagaacaatgtctgtatcacttgagatttacaagtggtctacaccgaagagtttagcgaagtatagagaaatggaacattctcacccctgatagtcctgccctgtgccagtcaaggagtcagcatgagtcattgcttctaatagaggaggtttggttcaaccatcgcaaggcaaacaagcaaacaaacaaataataatcatgatgatgataatagtaataataatcaactagctacacttgaaaataatttatttctatagttaatagaatatcaccagcttgttggtcccttgtattcctgtgaggtgtcctgcctgtacatggctcagggtttgtgcacagggggttatgaatgtgaaacatttaataagttcttccttctccttgaaaagctttataggtgataatggctgttccctgtatccatccactgtgccctgatcatcctacacatcctgaacagagcatgtaatccttacattgaccttacaggacaggaaacacatgtaacagatgccgaaacaggttcagaaattgctagtgaccaatctcacagtggcttctgccagaccaagtcatcggtatccaagttcatttaaggatgtattattagtaatcagaatgtagatattgcaagataatatatgaaaaactgtattttctgatgtgctgaaggatagcttgatagaaaggatagctcaaaagtggagagtgtatttggatcttgaaggaagtgacatgttagggttgagagtcgtcagctacaaagaaaaatgaaactagggcatttgcaggaatattagattaggccacccagacccagaaaagcaaaaatcacatgttgtctctcctatgcaggtcttaatttttaatgtttatatatgtataaaaaggtagtgtgagagtggacatagaacactaaactaggtaggagatcatggagtggagaagcaggagggattgataaaagataggagaggtcaaaaggtcacacaggatattaaaaagttgaaaagtgctactaggggagggaagggcagaggaggaggaggaggagcagaggagcaaagggcaacaatgaaaccaaattctttgtatgctaatttttatgaatactacaagtgtaagtatgacttggcatggcagaagccactgtgggattgatcattagccatttctgaatgtgtttaggcatctgttgaatgtgagtgcctcctatcctgtaagattggcttaaggattaagtttaaagaattaagaggaacggatctgtaacactgttgagatagataagggcaagacacacaaagcctcacaaagagccctgtcaggcatcaaaagataagactccattggtgtggaagccacaggctagagtcagaagatcgtgtgctgggctccagattgggtatcgtggtggtagtcaagcagggggtagatttgacaaaatcgtttcatggtagtttcctttgtaattatttacagggtgcagctgaatgagaaaaattctaaacttaaagatgtcattggaagctattaacgttgagatttacattacaattctgatggaaagtgcaacatgggtcaaatctaaacgtctttgatagagttcttagcacagtatgtttgtttagtagaaatgactttttgctagtgaattataaacaagatgtttcagtatcagtttatttcacataaagagtaagagaatagtcaaagttatctcacacccttaatcatgtaggataagaataaaggataccccaatgacatcattacatcactgcccacatgaaatcaggataccctatatatgcagtcacagctaacatttgctagatggtcagttatcaaacacaaaagttcactagtttagcgaaaagaagaatgggcagtgagcccaagagaaaaaaaaagccattttcagatatctgactgctctattcacaatagcaaagacctggaattagcctagatatccatcaatagatgaatggatagcaaaatgtgattcatataatggaattctattccactgtaaagaaaaatggaacaatgaaatttgtagaaaaaaaaatggatggagcagtagaatatcaaattgaggtaacccaggctcagaaatacaaatgctgaacattccttctcatatgtagatctgtaaaaaaaaacttttattctccttagtaactgtcatctcaggagcttgctgcttccatctcctaacctaggcctagtgctagaagtttctagcctctgtataatcaaatctaggcctagaatgtttttagcctcagacttgctactgaataaactcaccctttctagttctttctgagttctggctggctggttgaactcaggacagttctggctccaccttctctccaagctgactaattcaacctgacttcttttttggcctctgacagaattgctctacttggcctcaaaataactctggcaagctgttttaatcctctggctccttctcactctctggctcattctgccttcacctgtgtctagctcgttctctcttcaacccatctctgtgaaactcttccagtaaaattgcctccttctctttgtctctgtactgcccctcaagtagctttccttttctctcccttcttgtgagaattgggcatatcatataatgtcaaatctttgtctgattcattactttgtctgccgctcagttgagcatcacttaaaaacatgggtgctttccttctacaaactatcttcattgtttgggattaaaggtgtgtgctaaggactgagccacacaactagaaacaggttttttccccccagtaagtagtacaatcttggggttcgtggcataatcaaatatcatgcaacagtgatcctagcttctagtgtttgtacatgcgtgcatatgtgcatgtgtgtgtatatgcatgtacttgtgcacaaatgtgcatgaacctgtgtaagtagacgtatgggtttctatgggttctggggatcaaactcaggtcatggtgcttatgcagcacgcagttcaccagtggagctatctcctttgaccccatttgtaacaggtttttatatgtgcttagttatgtgtgaatgagcgtgagcagaggtctagaaatgagatagggaaccacgagagggaaaagaggatgggaaggccagtagaacccataggatttgaaagtgaaaagggaaacccagggaatgatgtgccaagtaatcacatgggagagggcagagaggtgagacaggaagggcaagggtttggttgaagaggatcaaccaaaacacagaaggaaactcatcttcttttttaaaaattcaaaaaggaagaaaagacgagacaaggcaatggaaaattcgaggcaaagaacattcagagcatacaagtatgagggaaaggaaattccaggacaaaaatatgaaataacatttgaaatagcaacacattggaaaaatctagtgttagatctgacaaccagaaaatgattgctctcatggacgtctctagggcattcctttcttcggccagtgaccatgctgtcgtctgggtacttggaattgtcatctctctataatctactccagtgtccttttcttcagagatgcaaatgttccatgctgccttggttgttggtctgtgaacacaggtccatctctgagtcctggccctgtgtttgggctatatgttaaataaatgtttatagaatgaaaggaaggactgaatgaatgcatatccactccataactgggcaaaagaaacacacgaaaatgaatccaggtaaagaaatacactagaggtgactggagccatactcacagacctgctcctcttgatctcgccagttggagggtttgaagaatcaataattaatgtataggacattctagttcctaaaacacatggtgggactgattaattattgatactattagtgtttctgatttgtatcattattcttctaactgagctggaggatggatttccatgtgaattattgataccctcattttagaatgccaaagcggcctcccttgtgaagtctttgccgagctctgccctgctctttgcctgtctttctcctcagagttcactgggggttctcagtacacacttgtttgatgcagcgtgtctcacccgagtgctggcttcatgtaagcttggtctgtgtaaagtgctctaagtgcagtttagtatttagccctacaccatcgtgtgcacctgacgcgggccacatccttatcccacatgggataagactggttaaagaaaggcattctgaagttggcgctcttgactcttaacatttagcattgcttttaatattggtttgcttgaatttttatacatgtatatgcttctcataatactgcagggtttcctctgagtagagactgtatagcaatactaagctattatctggttaacttttgtctaaattagttgtaggaactttaaattgtaccatgacccatacttgaagataactcagtgggcaagtattgattattctgtatcaactggcctttaaacataaagttcaaatatgaaatatatttaaatgttttaaatgtattatttgttcatatttaaaataaccgtctgaggttaagtctataagagacagcatcttaccagtggagcctgttagttcttcctatccagacctggatccagtgttgctatattgtggtgtaacctttggggagctactgatcactcactgtttcagcttccacacctgtaagttttcacatccactcagaaagtgggcgtgagtgtctaggagttgagagagttaacgcctttaaaacaagggttacattgaatgagtgtagaaatgattgtaaccatcactattttagttattatttttcttcttccatttccatgtgaatgtggtagattgtacatacatggcatgcatgtgtgtatatgcatgtttgcatatgtggggcacacatgtgtacacgtgcacatggaggcctgaagttgacatccagaatcatccattgatgttccaccttgttccgtgaggcaaagtatctcaggcaagtccagagctcactggtacagctcctcttgctagctagccagcttgctgtcgggaccttccatctctactttcagacattgagattacagacaggcacctatgtatatttggcattaggggtgggggaggttctgggaatccgaactgtagtcctcattctagcttcagcacaataactatcgggttatcctgcagcccctatcagtattggaaaaaaaaattaattaatttttatatgtgtgaatgttttgcctgcatgtctgtatgtgtaccagctgtgtacctggtgcccacagattacagaagaaggcatcagatactctgggattggagttatgagttacaaatgattgtgggttctcattgggtgctggaaatgaaacccagatcctctggaagtgtagccaatgcctttaatgtctgagcttctctctagtgtctacactatcagtattttaatcctcattttacaaacgaagaaactaatacatgccctaagcaagttcttagtccagttcttaaaggttaaggaaacacttgtcctggaaccccagcccaatagttgcctttgtgtcaaatcgtgcccagatgcaagcccttcaatcattggctggattttaaggacccactcactgaggaaatgtctaacagtgacacaggttccttcttacctgactcagtaggaccacttagtaatatcaatgtcacagttgtgggtctcatctgatttagaggaaccaagttgccatagcaacaggatggctgtgttctaacaggccagggtccatcctgtctgcctgctctgtgcttggcattgccaaggacatgaaagaaatgtaagaggcactcttggctgctagaagtttataatgtataatgcatagaggacaaaatgaccctgttaggtccacgaagcaattaagtaactgcgatcacaacatcaaggctcaagatgattaattaagtccccagatgaaggatgctgatagcaaaagcaccataggcaagtttgggggagaaaagaagttaatttagctggagcggtttcatggagaaggtggcatttaaggacagctttgaaataatggtgttgtggggtcagtgtgtgagggagaaaaagtttctggaagggaaggaggctactctcaggtccaaagtggctgcttccgctttgctgtgtttccccctgagaacagatgtgagcttattacttatgtttatttattcttctgtttggtacaaaaacttcctaatgttctagctttcatcacgtctcagagaatatgtcattctccttattgttgttgttgtttttgatcaagcctgaagagttccagttacccggcataacacacaatagcatccttgataagtctccaggggtctgctgttttcagtcacacacaagagcagggaacagtagggaaggcagtgaaacctaaacaaatccaagggtactgaaagctcctcaaacaacggaaaacaccattaagagtcctagctatacacctgtggatgacttctaattacattatttacttcaattctccgagcagacctgggagagtcatttatatgcaaataccaggctagaaaaaaattaagaaaatgcatttatgaaaagtaatggtggagaggttcggggttcatttgaaatgtttctaaaataccgcctttcactgcacaaaagaaatgtttctgaataacaattatgatgcagtaaatcgagaggaaaatacctgattttatttatgtttatacagggcctaagtcttgaaagataaaagttgtggcaatttctttatgatggagttgtttgtggtcctttaaacaggtttgaaaaatagacccaaaaaaaaaaaaaaaaaaaaaaaaagaagaagaagaagaagaagaaaagaagagagcccttatttgttttttaatccaaatggactggtgcagttgcatggtgttagaatttcccaggtttttgtctctctgtcattgctctgtggctggcatttcccactgacaacagaaccatttgatattttaccaacaccttggctttagcacaggaagcctggcagatgaaagcatgggcacgcattcttaattaccccagggctgtggtttggctttcaggtagaggctttcaccctgtgcttggcactcagggctctcagcagcccattcagagcagcaaccctttcaaaccggaaatgagccagaaaccaaacgtgtcagacatttgtgtcgtgtgccagtacagtttaggggcagccttacaaatagggagtggggtgactaccaccaaccagccatacataataggtttttatagccagaatcaagagatggtgtgttatttctcattcttcaatattttgaagtcagcaagttgtctgcatataggatttgcactcaaattcagtgtgtcttacaaatgaaggtctaagggacagaaggaacaatggaaagcataggtctcctgtaagaggaatcctgtgatttccatgtataactccaaatataactcttaatagacttatattttcatcactgttaataactgtgataatgctatgtcgctgacttatggatagctgaactgtgctaagtgatgcggcacacacctgaccatgtgacatctcattttaacagtactaagaggaaagcaatcttaatgcgtattttccaactgtgaaaacctgaggctcagtgattatataatatgtaagagttagtaagcagtagcctcagtgtgatttggggtgaattagagaggtacctcccctgtgtttacgtcctcctgggtttctatccaggctcattctgagccacacattccactatcagagtcattctttccgattatcaagaaaggactctgactctgagtagagaaacacacacttctgttgccttttccccactctcctcttattctgcctccatgttaccagaaattttagggaaaaagcttgttcaccctggcagcaccaacaagctaggctcagccacaatccaccatacccaaactaaaaacatatgtaatggcaaaagccagagaaaggtgatatagccaatgtggccattgttgtggtaaatctccaacccaaatatgccctagcaatgaaaatacaactcagttaatatgaattcatgctgtgtgcctagactgggcagatctaccactacactaccattttccacagcttatgagaccccttagaacttgtggtttctccgggccatgtgcttctgctccacttttcttcttcctcctcttctgcattttctccttcttctccccctcctttcagctccaccctcccttttgtctgcccaatcatcagatctcctttattttacaaattaaggagggaagcaggtttacaggaaattacctgagtgctgactcattccttgcttgcagccactcacaggataacagaattaacatcaaatataattagccccagggctatccacaacaggccaaagactgggaaaagaagtgattcaaggggtcgaatgaatgacccccatgtctatcttcaggggacactggcataagatgtaggtttgaacaaagggtaaaaggtgcgcatacctgagagcctggatgaccattggtcctgcccatcattgacttatggctgtccagccaaccactatagtctcctgaactcggtggaatcccttcttttgattcttcttcccagagcatgagatgtgtggggaacttttaattccttgggttcttttgtttcagaactctgatagtgggagggaaggatgcatgcatccctttatctcttctgtggcagggtgggaacactgtgaccttcaagtcattttttttttaaaccaaagctggcttccatttaaaagagtggagatagtaatgtatatgtttaaagaaataaagtcctcaaatttaagctttctctgtagtagcattgctaacatctgccagcatgtgggaagaatttgtcaagactctcaggctcttcctcactgccctgaaccaccatgcatttgcttatttattctacaacagttaaagcttctgcagctgccgccagaaagcgccaaaaccttgatctataagcaaacactgtacatgcccaggcagtaccccctgaagtcttaccagcgaagcaggaggaaagagtacagaagcagcagccagagtcaatgctgagactgctttcttgaacattctatcattttggttacacaataaagagcaatatgatcaggggtcttttccaggagagggaaccaaacctcagagatattaaggggcttcttagcttctgtcatctgagaattcaacctagtttgtcgtggtctttctatcatgttctgtcccagagcttcctgaacaagctggacaaagaggtctcatcatatggagacagagcatttgatgctatggaaagagagataaggacttcttattttccaacctgaaagtctgccctaagcctggcctagcatggcatatgctagtgtgcaggttcttaggggctggggtataattgagagtacatgtgtgagaccatcacagaatgatacagaactcagcaactcaactatataaaagtgatgccttcagctttgagcttttaagcttcttggatggttgaagagaaggagaatgtctactggcatttgcagcttggagttgccatctaaggaactctggattctaactgggagaggaagaatgtcttcattgctagtcaatatgaagccatttctcatatcagacctattcaaatcatcctcccaatcgagagctgtcctgatctatttgaatgtccattataatcaatattgattatgaaagtatgatcttctactggagaagattcattctacttttgatatgaggcaaggtgtaaagaggatagaaaggaaaaaaaatggtacataatagcttatcagtaactttgctttcctgtgtgctgctaaatacttttctatatgacgcgaagagtctatagttaaagtggaattactttcacaaaaaatagaaatattcagtgctgagcagcagtctctgtgtgtaacagtgatgtctctgagctgatgggcctttagaatagatgcttttctctcatcactagtgttctgcatatatgaagaaaagactgctgggtcattttctttggttaagataaaagatgctttgcttattggcagtgtaggccatgagcatatttttattgacttctggaatcactaggtgatccatcaaatattcaggatatttagatagaaatatttgagacatttgttaaatattttattggggtttatattaagcatttggcttaagtgagacgtttgttatataatgtcagattggcttgatgggcacaattttatctttaagtcactaaatggtagtgatgataggcaaagcagtgctctgaacctggagctatggtaagccaaaggaggacatgggttttgggtgtttataattgaatagaagctgaggctacagttttctctttctttatgtgtgtgtgtgaatgggaggaggtgtgtgggatgcacacatgtgcacatagaaaggccagagcaggacgctgggtgttctctccagctctctgccttattgccacacggcagggtctttcaatgaagcagaagctggaatattttataggctggctggacaataagctctccagatccacttgcctccataccctcctgttggatttacaggcacaggctgtccgtgtataggtgctggggattagaactcaggtcttcatgcttgctgaagatacccactgtgccatctcctcagcccacatctttattgtaaagattcagtcttaaggaattattaaatgaaaaaatttgaaagaacctatccagattttctcagttctgctgcttaccacttgcagctgctatttccttgaagttgaaagattgtactgtctgatggggagcacaaagtgagcgagaaagaccctgttttcactaagcacgctacagaaagcgtaaggtggacactcacgagtgtttataccgtttatagacaggagggtgggaagagacagaggtgtccacaggaaagaggaattgctcttggctgatgcgagtagagggcctcacagaggggcaggattgacgttaagactgcaggcaaacaggtgtttaagataagcaacaacaaacccgaggaatgttctagttaaaaagaacagcagagccagtggatcctcaacgctacatgcaaaagattgacaaaaataattacacgtaactacttactgttccaaaaatgttcattattctttacctccaaaggtcctaaactaattactttcagctcccatggtaaaactcaggtgaatttctataaacaaaaggactgtctgtttctgttccaggcagacgatcctgtcaggctaacatatgcaagatgtgccacatctatttggtcttttagtaaattgctattcagggcaccatttaatgctccactgaaaagaaagtctgtaatctttttttgtgctctgtatggcagctcaggtggtacaatgaccataaaatatgctctacttaaagctgactattgcgaagccacacttaaaaagacagaggacattttttttgaggagtgcggaatagccttggttttccatgcttctgcaacctaaagagaaactagttccttttagcatctctttaaataacaagctttatgatgttggccagaatgtctttttctctgatccaattccaagatactttgcctgagtttaatggccagccaagtgggaaaggaaaacttaagttaagctggccttgaccgagtcctgaggcaactcatttttcatggattgctcgtcttaaaagcaccatagctcattgtcaacacaaagtctgcttacgctgtaaaccggacaccccatttgttttgtgaaacaactagcttaaaaaaaaaacatattaccgctgctgtcaattaatctgagtatttcatttggtggctgccctgaggcttcttcaacctgagaatggatttttcataactgagaatatgttgtggcttctttttcaaagtaagggcagaatttgttattttttctttagactttgaaagcagaagggagtcggcgttgtcaccagaggcagtgcccaatttttctgtatgatattttgtgtaacctgagtgccgctttcgttgacttaaaggtgacagcaaaatgaaaaagagggtttgtttagtaaagcaggtgtaaggaatgagcgcctgaaagggtcaccgaggggactgcagagggggcatccagggtacataactcccaagggacagaggggcagctgatcacacagagatgatatgcttgcaagggactccatgatcaggaagtggaagtacttggatgtctctagtttacagcggggcgttctggcactctcgcagcattatgtatgtatcatagccaaaagatgcacctagagtgaaatgatttacttgtttaggagaatcaaatattcatatacaaatccagaaagagctgggagaaattccactagccggctactgataggtgcctacttcagtcatatataattatttaaaagctcgggacccgtgagatggctcagtggggaaaggcttttgcaagtgagactaatgacctgagttcaattcctggaactcactttatggaagaagagaaccgactcccaaaagttggactccgacctctgtaaagacaccatgtcatacatatgtctactcccaccccacaacaaataaatgaatgcaatacaattttaaagttcaaaataaggtggaatctcagggttggtttgatttgcatttccttgatgactaaggatgttaaacatttctttaggtgcttctctgccattctagattcttcagttgacaactctttgtttagctctgtaccccatttttaattgattattttgttctctggagtctaacttcttgagttctttgtatattttggatattagccctctataggatgtaggattggtaaagatcctttcccaatctgtaggttgccgttttgttctattgacagtgtccgttgccttacagaagcttttcagttgagggatgtagccatccccccccccccatctcaaaatctttaacccagaattgttcctgtctaaaggcaacacagggacaaaaaatggagcagagactaaaggaaagaccatctagagactgccccaccttgggatccatcccatccgcagacaccaaaccccaacagtattgctgatgccgagaaatgcttgcagacatgaacactgtcctccgagagactctgccagtacctgactaagatagatgcagacactcacagccaaccatggactgagcctagggacccctatggaagagttaggggaagaactgaaggagctgaagggaattgcagccccataggaagagcaacagtatcaactaatcagacccttcagagctcccagggattaaaccactaaccaaagagtatacatgggtgggttcatgactatagctctatgtagcagaggatggccttatctggcatcagtgtgaggggaggcccttgtcctgtggaagctccaagccccagtgtaggggaatgctagggcactgaggtgggagtgggtgggtgggtagggaagcaccctcttagaggaaaaggggatgggacatgggggatggagttgggggcttttggaggggagaccaggaagggggatatttgaaatgtaaacaaataaagtcgttaataaaaaaaagccaaaaacaaagttcaaaataaaccagaaaaatagaatgattgatatttataatttgtaagtatttatactttataacacgccgggcgtaacacataaaattccaaagaatagatcgtgtttatgattataaaaatatctttaaaatcttaattaattgtttcttgaattgtggggaagaatgtagggaataaatttgtatcttatgcttgccagaagtagggaagttactcaaacttcaccacgtctagcaccttgcacattttagaaagatggggtatcagcagatttggaagccctgtctattctacatttaactctctaccatgaggctagaccgttccttctgacttgagtcaggaattctacctgttttcactgaataaaagttcacaaacattggagtaggaagtaaggcaattcttgtccagtgatcaaaagatgccaagaaattaaagtgtcatttctgtcacttgctgattctctagtggttaaaggggtaaccctgcaagagggtcagggttagatctgatcagtgcaattgtcagtatacaatggtgacttcaagtctgtagaaagtcttcgtctagatttagtagttattaatattaccccatatactccttctccttatcatgtctctaaaataggagaatttgcatatattagttttagaagaggaatgtacaatttaaaagtaagtttcaagctacagaaggagaggtctttaaacaagtctaagaagtttgcaagggctttggtatcttacccactgtgtcatctccacaacccatatttttgattttaaagattcacttttgaggaattattaactgaaagaaattgaaatgacctatcttctcaaaatataaatttcaaaaccctgatctttctttgtttggttgcttatcattcacagcagccttttattgaaggtgaaagattctactgtctgacatggtgcacagagggaacaggacgggcctcgctttcactgagtgctctgcagaaagcttaaggtagagaaggtagctagggctgtgagagaggaagctgtgatccgagcaggaagcctaggtgcgccaaggaaaggacgttcctcctcagcttatcctgtggatgatgaagaatcactgacttgtatgaggcaagggagtgacctcattgtgttctgtcaccagaactttattgatgacctcatgtagcatgttagagaagaagaagaagaagaagaagaagaagaagaagaagaagaagaagaagaagaagaagaagaagacaacaaagagtaacaaccaaacctagcaagataaaaaaattacaggcaccttgataggtctgtagctagatgtagttttgagaactcatggacttttaaatgtcctaatggcttacttatgaattgtcgtcctattttctttctctttttgtaataggggtatttttgttttattttgtttatttctttgtttgtttgcaatttcagtggcacccattacactgtgccacttgtcatgtcaagaactaaagaaaagaagatcgttaagacagaagtcttctcctttagcagtctagatcaaagttgctaaggttgcatgaggaagttttaaagtacatacttttaattaacacctggtcgttatgtgtattcacagggcataggtagcacttgcatccatattatagtgcacaataatcagattagtgcaactgatgcttcaaccactcaggctgctatcatttctttgtgttgggttcattcaatatcttgtctgctagtgacataagagggtttcattattgttgaagttaatcaactgcatttgagaatactcatggttatccctcctcttcagccctatgttctgtctccagaagagtcagtaaatagatgatgcctccagcacatagccatcagtcagagtcaaaggaggatgttgacccagctgggattcccagttgtgatcttcaaaaatttggggcctgggaatcttcctttcctagaatctctctcatgggggtgtgggtacacctagttactgcctgatttggagaacacggagctgtcgaattagaataggaagggctcagcagtagagacccagacagaggactcagaaatagtcaacaaacccaaatgttatgaacacgtttatcatgtcagcctatgacgttcaagatgtagtgtcataggtcacttgtgcccttgggaagctacaaaatgtgagggacatgctggaagtatggcagtaaagatgtttgacagctgaatggaatgggtgttgtttcactctgatgttagcaaacgagatgaccaacagtgtagttgtgtgctttgggttatccaagcagtctagatatgctgacatgttaaagtgttatacagacagcctccacctcaactgttatacagacagcctacaacacctcaactgttatacagacagcctacaacacctcaactgtttgctcagacttaagcaggttcgttaacttgagagtttgattcgggacctggccactgtgtgggaatatctgcctaaagacgataaaagaatacagaggatggcattagtcatcctgtagcactgacatgctcagagcttatagcttaaactcaggaaacatattccctggtacgcctctatgtcatttatcactgctgtgtggttaggccagataatctaagtgacagcaggcacagatagcgattgcagttaaccagccctgaattaaacaacgaagataagtacaatcactgcaggctcaacctgacatttatttcatgatatttgcctcaaatatgtttggaaataaatgacttaaaatattttctttttttgagttggcagaggaagagatggtacaattgcatattcttagttcatatctcattagaagtgtcaaagcaagagtcttgttagactttttaaaatcaggggttttttcccccttaaacttgcttgcttttgctttgttttgatcctcaaatatcttaaagtacaagtcttatatagacactgtggatgtgtgctgttgtcagggctctgggtctctgacttccggataagctctgctcatggctagtaggatggtcaccatgtcaattcaatgacatgtgaactgactattgcaaataaccttggcagaaaaggctctgtggaattagactttctgactcaattatgttttaatccatgagccagttgacttacatgtagctcagtcagcaagttgtagacactaggccaatgccattgcctcctcctgccaatgggcaaaggtgaggggtggccttcatcatctctcctgtgctcttcacatacaagagggttccgttctgttgacagggaagaaaaggatttttttttttgtcaaaacaagtgatggggaggcagggaaagaggaggaagaggaggggaacaaggaaggagggtgtactggctagttttgtgtcaacttgacacaggctggagttatcacaaagaaaggagcttcagttggggaaatgactcaatgagatccaactgtaaggcattttctcaattagtgatcaagggggaaaggccccttgtaggtgggaccatctctgggctagtagtcttgggttctataagagagcaggctgagcaagccagaggaagcaagctagtaaagaacatccctccatggcctctgcatcagctcctgctttctgacctgcttgagttccagtcctgacttccttggtgatgaacagcagtatggaagtgtaagctgaataaaccctttcttgcccaactgcttcttggtcatgatgtttgtacaggaatagaaaccctgactaagacagagggagaagagaagataaatagagcacactttctgtaatggtttgattccccagtcatgtttgtatgtctaaggaaggaagaaaaaaaaatcaaaggcaaagtaaattattgcctgaataggcctcaagaatgaagaaaaatgcatttcttcaatagtatgaacaatggctgttgtctggccttttagtaaaataatggatattatagatctaactaacataagatctaactttaactttccttgtgggaaatattccacatacaaaggtagattcctttggtctttgtaccttgcaaatgtacccagcaagcaagtactttaaattaatggatctgtggctatgagtcacagaattagacaagactatagaagccaccaagtcaacattgtgggtggctgctgacacccctccctgacagtgtcttctgcagtgatgtgttgaaacactctttggatactttcaaatgaaattttgtttcccatctatcaatgttttattcagtaatgagagaccgttgaacaaaacccccacggaatgttaatttagcttatttacttcaccgccctccttccccctctctctagaagatgtgaacaacaaattcctatttgtaatatattaagcaatattatctcctttgaacaattggcctatgttcaaggagctttgtggaaaattctaggtaagatatttttagaggagggagaatggaggagatatgagcattatttcaggtccaggtccctctctccagctcacaacctaagagggaggtttcaggaatggctgtatgggctagcctatgcctggagagacatccagtgtggcttctccctcctgatggtggaaaaagtccagagagctggcttctgccgtgttagggaatatacacagacttgaaggaggctggggtggtgaaacacaaaccccctcactgcttggattgttatttgttacttacagtgacagaggctctttaccgtgcaataagtattttcattgccccattacttttttgttatttttacatgagtagattacaaatgcagacccctgacatatcctattttgggtttagcctgctctgtcttttattcctgaattgtatttttttgggtcatttaataatattaatttgctgcattgagatttttctgtccttcttatattcactgaaatgattgttcacaagaacacctgtggataagcccttatggaaatagattaaatccatttacttttaaaaaagaataatgtaatcaccattggttaatcgtatgtgggtgagaagaccacagacatttccaactatgtttgaatagaacatttctaagatcccaaattagtctgagaatttgaaaactctcaagtccaaaggggttttaagggctggaggggttttatttgtgtctgtgttcttatatcattttctctacttaggaggtgttttgaatcacttgacagaaaatataagatgtggttgcaagaaactccagaaaatcactatccagagattattattattattatttttttgctattccaaaaatagcaaattcagatggcatcctcatcctgcccctgtcatgtcttgattgataacaaatagacttggcgggagagccggagtcagagagacagtaagctggaacacccattaactcaaacacagagattcacctataagcaaagggctagcattgtctcaatgtgctcatttacacgcagggtatggtgggatgctaaacaggcttattagggagatcgctggcattgagaagaaccggcaaaagagggttgcaaaaattgagaattttgtgtcagaaataattacagcatgcaactgctttcccctgtccatcttcattggtaagggaggccctagacattgacaaaaaggagtttgtgcatctcaccctagtccaggtaacccgcatgtcccaaatgcattctgtattcccacacacagatctccaaatcttgccgtccaaatttgatgctactgttagaattgccatgaaatccaaagctggtgatttaagctttgcacaactccttgtcattggctacatttgcacattttacttttacataataagtattttactgtccatatgaaaatgttatagaattattttcatatgtgaaataaccagaccaccatagagaatacatttgtatttatacataaaataatcatcttattgtagaaaattagtgaaaaattaaagaacaaaatagatgattaaatcatatttttgaaaaaaatttcaaaaatgtattttggtgcacatttttaaaaagtccatcattgatgtttagactcaaagtaaattgtcttatatatatcatttctgaaatcacttatggatattcattatcagcccttcagatcataagtagccttttgtttcctatttgagtatagtagtatttaattcatccttactagatcacagtatgtcttccattcagtggttttataagtgaataatagtaattaatattaatgagaaagtatacatgaatatagaggaaattaaaacaccatctgacatctgttgactgttaatatctgtcaggtgctaccatagggactcacatagatcactcatttagtcttcataactttataagatcaatagttttgtctgaggttgagacatgctgagaaaagctggtttataaaatgttcagggttactaagtggcagagtcagcctgtgggccttggtgctgctttgtagcactgggaatcaaacttaaaatcttgtgtatgctctaccacttagctacattcctagcccaaagtctaactctgagtcattgtgttatgttgaatgcctgccattaatcagaaggaggtttgacatattattgcttctcactgtgaccaaaggaaaaacgttctctgtctctggacagataactaagtgtgtgtgatttttgttgttgttgttgttcaaaaaaaactatcttcatacatgagaaatatgaaatatttttctgcatatcataaggaaaatgaattcataatgaattttaaaatagaaaggtggagatatcagggcaatttcatgtagtattatgtgctgaggaaaaaagatctttatgctattttctaaattgaacgaacacaccaatcaaattatctcaccagttactaacgtagcagtagacttcctgtctgttgtgattcctcaggaagtagatcatcacgctgtgtggatgtgagatgttcctttgcaatgtgtctgtggtgtttcccagaagcttcgctgcatcctttactccatctttctcagccttcttgcatccaattctaacctgtcctgtatcttcttagctcttgtattttccctgcagtctctcccatttcctaagaggctttctgacgtctttacccaatcaattcaactctatgaagctacctcctcttactttccaccagtgaccgcaagcctcgagggctgaatggtttcttggcaaagatccttaacatccaatatgatgcctgttaacgttgtcagcaccccaccccactcttcttgtgataattcttctactgcattgttctcaagctgtgcttcctggatccctgagaatccacagatgtaatctcagaagatccacggggtcctacgataatttcacctttgtgatgcttatcataagatgctctaggctgttatgattcaatgcttccacttgcatctgtgcttcagttttacagtggggcagcaaagcctgactttctgacaagtggtttcttgtactgagggtccacaacctctgtctgagttctcgagttctccagattgaaaaactggattgctctacagtatggagataggctgcatggatggtcccacggctcagcctggcctttgtatgcgtgctgtgactttcacactgtggcatgtgctaggagttgcacaaaaccaaaagtccccattctgttaattggtagaccctgcgggtgagtaagaagcaaattgaaatatattgtcattggttggtgcaagtcttctggagaacaggttagcaccgatatcacgggccttggaaggctgatggcccaccaaacctacccactgataagaatttagtttgtgaaaataagagcattcctcagatttatagacaaggagcaaggagttagatggagaggggattattagaattaactcaacccaacactttacagtaaagatggaaaccagatttggagtttaacaatataagagtagtagtaaatcatagtcttgcatgcgatgttgtatttggcactaaaagaatattttcctactatttcctactatttattttcagctaaaggtcacagagtatgttttgttctgtttaagagttaaatggagactattttaggctttgttgatgatcttaccctttgaattgtaattatctaaactctacttttgtgacatgaaaacagccataaattcagaaatcatcatggctgcattccaatagaactttatttgtggacactgaactttcgattttaccatgtttaaagacatagaaataaatcttaaaaatttccctttaacattattcttgggaatgtcatatacaatttcagtgtatttggccatatctcctcccactcctcttcttccacgtttatgtgttcattttttattatagctcactaagtctgcttagtactgatgatatgcagtggtgttctctcagattctggttactagtataacactgttgtaagatgaagaatatctgtatgctacttgtatatcagaagaaacagttgtagttggtatctacctgaaagtagttttaaaggttaaggccaggaattcattcaagagagacagttgagggtctgggaagatcacaacccccaatgtcttgaccaatgggaggaaactgggcaagcaagccatgggtggaataaggagagatgtgtgactacaggggagggaagtctgggcggattagaagtaaaatcacgtcccaaggtgtgatttgctgtgctgtgactgcatttaatctgcaacaggagcacgaggacaaacaaggggggaaaaccgaggtctgaggtggaagcagggaagggcatgcttcggaggaagcaggctatgcgactgactaggaatgggacggaagggagctggaagagagaaggcaggaacagaagcttgtctcctgtgagcggctgctggactcctgtgagcggctgctggaaaagacggaaggaggagatccggatattctgagtgtgaggaagttgttgaatcaagttttggtgaagattttcagaagaatttaaagatcaggaaaagataagatttatagagtttgcaggtagaagaacagaaactcggaagcaggagggaataatgaaccttctcatcaaatatgatttgtatttataaattatcaattatctactagaccttcctggatcacatacggtgtcaggtatttgtgcttaaaacgtggtcctttaattttacactggatggcaactgatttacattttctgttttcatggacttaggccttggaagatcgtgtgtgggaactcttacgggaagcagaccggacagctgaagcaaacaaggctcaaagtcaggtgtatgacgccatggcccagacgctgggtgaggcatgggcaaccctggtctccatgcttgaaagaagaagggagctccttgggctgacgtccgagttctttcaaagtgctttggaggtgcgtgtttctgaacgcattttgacatcctaaaacaaatgtttgacatcctaaaacaaatgttgcatacatgttcaaaatggcaggataaaagagatatatacgatacaccttgtatcgtatatatattgtataatatgtacatatatgtattgtatatatatagtataatatataatgtatacataaaataatactttaaatatagaccatcagtcatatagttaagtaaatgcagaacttttacacatgtcactttgatctagttccttctttagaagatagtaatatagactagaatctaattgctctcactatacaattattggggaatgctcatgtggggaattttattggctaaaagtcagaggataaaaagaattacagaatattccatagaacgtttgacttgtaaatacagcatcttagagtattttcctgaggaatctgagtgctgttctatagtttaagcccattaaaatacaaggaaaggaagaaaaaggccccaaacttccaattgcttatgactctagttggctgcgtgaacctgggggagcaggccgtaaaaaggaggtggactaaatctcatgcaatagccaacttgactcagagcatctgacaagttatatgtgggaggttaggttaagaggcatcactttgcgcaaggtactaatgatgaggacaagctgcacactgtgaagacacggttttcagaggcacatgaataacaacagccgaagtaaatcctgctacacctggtaggagcgtgaaaacacattccaagaccagttctgggttttgaagaaactgaggccacaagactcttgtcttgttttctcagaagcagtcagaattctcctcacacaactttattcctggactgtgtttcaacatagatgaatggtcactgaacccctctgtaatctttcgtgtgtgtgtgtgtgtgtgtgtgtgttttacatttttctttgtggaggttatcaattaaaaatgtgagactccccccccaagatatatattttgtgcaagacaattattggaaatttcacatttttaacttccctgtcagtggcagcaggctcctgctgatatgcagctgctacctcggtgtggttaaacactaactgaaaatcaagatgttcttagaagggaaattcaggagttaagtccagaattacgaaggtaaggaaattagccacagaacataaaacttgaggtggacgatctcatgctccatgaactgatttcgaagaggaacaaaccccttactgtagcttttaggattcacacaccacagctccaggccaaagctctgctcattttatagaccatcttcagggaaaattcaatagatgatctcctttcttgaaagaagaaataagccagctgaagtatacccacagaagccaaattacagccctagccgattcattccatcttcgtgggaggggaataaatgtcaccgtctttgaaactcagcactcttgagaacagcaaattatcttttcctaacatcaggctcaatatttgtttctcgctgtggtttagcgttaatgatagctaattttctctgtgatgtggaaataacttccagatattgtaaggagtagaaggaaacactaaattgagccagatcaactgggcactgttatccatccactcaagtgaacttttactgggtctagggcactaactaaatatgtctgtattatctggcttcccattctataaactgctcacactaagtggagggcagagtcctacataatctgcgtgcagcttctctgtggcaaagcagttttcaccaatgattaaaagagatgattgaaattaattttaactcttgtttgagttcctgttgccattcctattccagacaagcttcagaaagagatggaaaaatccacaagatgagagttaataggagatcaaggacttcttagaccattgtttcagatttaacaatcttgagtaaagagtctgacatagagatatgtaaactataccatggccataagctctccgtaatgttctactggaaaacaacaaataaccttcaggggttcctctttggaagattctcttggaataatgtctttaaaaatcagttatagaaactgggtgaatgagagatgtgaagttcgtgtgcctgtggtcccctgtaagtataaccacagcagagttcttcagaattgtaagagaggttatgatgggatgtggtggctattataggataatgtctgacttacaagcttaactgtcagatgggggtcatctcaaacactgctgtgtctgggaacaatacacctgagtgacagtggccagtgtccattagcttttcttacaatggtactttgcaaaggggcaggcccaccaggccctctcgccattccataccacttagaactgcatttcctgcaagctgttgtgataatcaaaatatgatacatcctcttagtcaacttgtttcataaaatattaagtatcaccaagttcaaaggcaatactttaaggaaagcaaaacaggaagtctagtgccgtgggaggcttctttgtgtttctcatgaatactttgtctttattgttttgttctaaaccaaatctaaaggaggacattttaccaggctctttatgaattatgataacctctactgagccttggtgtaaaaacatactacctgtatgtaaatacatgtcccaccatggggacatagtaatagaatatttaactatactttgcctcacctaaaatttatgtttaagattatctctccaagtaactttccatccacatttacttaagaaaaattttaacaaatgaaattgatcatattggtcaccatttgtgtgttatacactctccttgaagtggagaaatgttccagtttttacttgagatttagccaatctcattctatttatccaaataaggcataagttgtgtactgttgacacaacttcaaatgagtttgccagttacagcttcaaaagttaaagcttgctgcttctctcccatccccagtttcactccttcttaccaaattaactaatttattttagtttaaagtttattacatatttttatatttaatttagtttcaaattaattaacttgtttcagacctccttctcttccccctttacatgtgtgtctgtgtgtgtgtgcatgtgcatgtgtgttttcttcatgaacactagactgtcatttagaaacatttacagtttatatataagcttaaacacacagaggaaaaagtcacaatatctaagtagattttctctgagatcccaagttaatttactttgattttatagattacttgtgagtcaactttttttttgatttttgtcagcaagttttctggctattctttgagaactattttagaatattgatggttactgaatttatggctgtagggaagagacaaccttttctatataaccttccctgtataagctcttccctatataatatctatgtaagataattttagctgaaaaacttacaagatatttggaggtggtttattttagcatatataatgtatttctggttacaaaagaaaaaatggaggagaaacaatgacatcctgtaaattcagtccatgtaaacacgtgcacaatatcctagattagagcacactaacatgcatcttcacacagcccttccccctccctccctcnnnnnnnnnnnnnnnnnnnnnnnnnnnnnnnnnnccctccctccctccctccctctaccccgcttctctctcttattgagtcagcaaggtcattagtgtatgagaaaaatctgtaagtataataaagtatcctgttggttttaaaaatcatgttcatgtctttccttgtgttttctcatagtttgctataaaaatagaccaagctgaagcttttctgcagaatcctcatgagtttgagagcactgaagccttacagtcacttcttctgcttcatgaccgacatgccaaaggcaaggaataggggtttcctcctttcatattagcttttgcagattaaaaaaaacaaaaacaaaaacaaacaaacaaaaaaacaatgttaacatgtgattctcagagaggcagcgcttggagttctcctactgtgatactttaggttgcttcaagaaaggataaacagaactttgcttttggctaccttctgaaagaaagcgttagtgataggtgaccccagggaaggtagagagggcctgtggaaagttcttccctgggtgttctagagcttcatccatgaggacagaggctgatgtggccctccatccccagcatctgtcaaggtgctgcatctcttaaatgttccatcgaagggtagattttatacatcaaccataagaataattcccctttcatcatttcaataaaaaagaatggagacgaaagttcaagaaaatattaggcagagtattttgaactctctctcagagtatctagtagtaatgattttattgttaaagcatagtttatatgtcagtcttcgccacaagaatctggggctggccaggactgatagaggaggtggcacctatgaaaataatgtagataaatggttgggggaaagttctttttcctgttttgaaaggtattttataatctgttactgggcctgagggaaatatcttcatagatttatcacaaatttttatattgttagtgtttgtttcattttattttgacttttacaaagactccatgtagttgatatttgtcacttttaactggatttgatccccaaaaagtttggcaatgatggaaaaggaacaaagcaataaagtgaatttttaaagacacaatgcactcacacatgcacacatgtgcacacacacatgcacatacattctataactctccaacactctataaaatagttcttcattattaattgcttgctacaaatttttcaaaataaagtgattaataactctgtctttccagtgtaaattttttggcagcctgccaaatgcatagatgtgtttttctggtgatttctctgtcacacctgtcactgtgagatataaacagtaacagtagactcagcactaaagcctcagctggctgttttgacacagcagcagttatctcactggttcccctgaggctaagctgaatcacttaacattcctggtaggaggctggaagagactcagatccagtgaccaagatgggttctatggcctcaagtcaatctcacccagccaatgtgattatcactcaacaattttactcatggaagcgaagtaactttaccccatggaagtagggactttccggcaaacatttgctgctggaagaggagaccattaaatattcctttttctacatttgctagcatcttcaggtttaacagggtctgtacacaagggagccagctgaatcagatgcaccctgtttttatttggaagcctgaggctatgatgtcctggtatccagctggcaatggaaccatgccttccttttcagtgtaatctttgagagtctactgagcctcatcgtgggttgacaagatagatgaaatgctagctgaacacagaaagcatactttgtctttggtggcatgaatcttgggatatttttaagcctctctgtgtgatatttgaaagattgtagggggcagtgatcaaaagaattcagtcctaatgaataatgcccaatggtggcttcaagagctttgtttttataagatgggatttagactaatcagccggttcagtgggatgtgattaagatgatataatttgaagtgcacattaatgcataaaatttctgattgctaggcaagggctttgtatctatcatcatcattaaatttacgggaataaagtgtgagttagcagttctaataaatttctgagttattgagcagttgagttgtataaaagtgtattatcctgatgacagaatataactgggagctatggtgacacctacctccaactgtccctttacttcatttagcttcacttgtgtgaccgctgtactccattgcataggtcagaacaggatgactgcattgatgtttctgccttctggattgttccaaaatgtcccaccagggtacaatgctttagattacagaagactaacatggtctcacccatcttttctccttttgagctaacattgcctttttagtctttttccagaaaatggtttcctgattagtttcccatcttctgttttgaatcgaatgacatagaagaatgtttctgaaacagttcttggtgacgaacccatggtcctgtcatcatagtgcactagcgcagtggcaagggcagttataagctaaatagccatatataatcgtgccgtcaagacaagagctatgaataaaagtaatgttgtgctatggaaatggttaataggagtatttggttcagtttatcctttgaggaactgacaactgtcaggcctgaatatgcatagaatagaggtggagaggaagggagttgaggtgaatggcattcttgacagaggaaataggggagaatatagaggtagggggaggtagaaatgtgtgaagaatttacagaggcgagatggagccttttggaaaaggaagctagaagttaggttgtgccagatgtgataatctactttaagggatatggccttccattttaaggcaataaagctgtagttgaaagaggaagagaggaaaagttggaggttggcatagaaaagggaagagaggaatggaggacggagatagaaataggtagaagaagatggagaaggagaaagagagagagagaaagtctatatacgtctcccgggacaaatgcctgtttatcttagacagggcacgaaagataggctaaagaaaacattcatacgttgaccttggtgaaatgataagtctgttgggctaacttatgggagcatggctgactcagaaccagcagcgtctcaagggaagccacctcaccagggtgatgacttgtaaaagctgtgttactgcagctttctgctgaatttgcagaccaatttactgaaaagactctttcctaataaatatttacagctcatgtaagcctcccccacccctgggaatgttgtggatcttataactttagagctcttgggtcttgtaagtttagtgaagttcctgaacctcataagtatttcagtttcctgagtctcaggagccttcctcctcccttcaggaggggttgatagaataccacttaccaaacacaaagcatgtttaaaaagatctctgtgggttaagtgtgaagaatgggggagtgggttagagagaggatgcagtcaggagagggttgcacaaatctaggtagcaggcaacactttgcatcatgaggtggagagaagcacacatattcaaagtgggatgagagtataaaatagaaaaatcattgatggtaagataagggacggcatgggtcagagaattcctacccctggcttgtaaataatggatatattctaggctgtttctccaattgatgctgatgtgtagatcttcaaagcactggtctcaatcctgcctacccctcaatgctctctcccccaggtgattcttcagttcttaggatttaaccccccattctatagtatacaatacaatcactatagatgttgttaactggtgatccatttgacagacacatgtgtttgatcgcatgggatttaaaaaatccccagaaattgcaaagcatttaacatatttatacatttaaattatttgcaatgccgcatatcattagtatgttatatatatatagtgaagaatgcacaaacaattgcacagaggctccttattacatttcttcctttctaatttccttctagaactcttagaaagatccctagaccttttaaacaaaagtcaacaactgactgacttcatagaaaaattcaagtgtgaaggatctactatgaattctgagctgatccagggagctcagagcagctgtctgaagatcgacagcctccttgaacttctgcaagacaggagaaggcagctcgacaagtacttgcagcaacagcggcaggaattgtctcaggttctgcagttgtgtctgtgggaccaacaagaaaaccaggtaacgtaagtggacatcaggtgaagtctcagtcttggccagttggttattatatggcctggtgatgaaatggtatcataattgccatggtcgaatatgacaatggctagccccaaagcattttctcttaactactatgtagctttcccaagtaagtatgcatatgaaaatgaagattcccatctccctttccttatcgtgttaacactgcaaatggaggaatgcctaggtgaacatttgaaaatatgtatcccatcattgtatttgcagtctcccctccagacaattactttggggcttttttttttttttttttttagttctgaaatgtgaattacggtttcctgggaatcagaaagatgtgccaaattgtgctagattgctactgatgccatttaaaacaatctgtaactggaaaatagagatagctttcctgcaagactggtcacattccagtggaaaacagtagaacattgggggtttgtggttataggagtttaggactctgtgggtttgcagattcagtagagttcagactgtaggtataccacttcaaagttatagtggccaaagtccctgatctaacggttgatatatttactgcagcatttctgtttgcaccaatcccttggtcacaggtgtgtagattcagtggcaggaaatcatcaggaggccgcactcctggtcagggtgcatatgttttctattgctatgatgcaaactagaagtcagacataaagctggaaggatatgtgtgaccaggagaagttggttcttttttcaggctaaaaacaaacaaacaaacaaacaaaatgaagatttaatggctagcatttagattttacttatggagtacctactacatgctgttccctattacaagtgttgcagttacacacaacaaaagtcagggtcattttcctttatgagttttcttttgttgtatttctcagtctttgcactatttggtggtaggtagctctcgctctggaggagagtgtctggtgaacactgggaagtagaatctctgaggtataccaccctactgtgagtagaatactctcagaacatctaaaatgtcaccagaatttgtaaggtgtatcccagcatgcaaaaatcagtgtcacttgagaactactagatcgtatgatgaggtcataaaataagtgaacaatgacagattctcttggaaaatttagtgggatgtgagtgttggccttgccccattaatcagataagcctcttgcagaagcttccataggctggagagccaggacagaccatccagtcacatattctacttgtgttctgtgaccttctcttacaggctcaccctttctgtaagctacctcttccagcatctcctgctggttcctgcctgctactgatgctcttttgcctgctcctcttttcctgaccccatctttatcccccaccccaccttcacatatgtgttagtcagggtacggccgtgtggtgcagttggctttcactgatgacggtggtgtacaaacacaagcatccactcaaagctgttcattaaacaaatgttcctaagttctttgtcttccctgtcacaagcaggttcattacagctcatacccttccttccccccttcctgctccccctttcccagtttatcctctctggcatctagttctctcttaactatgacttgccaccatgttcccagagtgactgtcttctttttttttttttttttttttttttttttcagaacagaaaaagcttggaatttattacttataccatttcattatcaaatgcatgaatcaaaattcaccagtttcattatgcagtatatgcgccgacataatttttctatttgtaacttggtccatgattgggaattcatttgttatctgtccttcatttccacaagtctgaagaactttttcagtcttgcctcttctttcttgaagtctgaaagactaagaattcattattttatgtaatgtcttttgggttacctttgcataacagttcccacagttagactaggaattggaataaagcagagcatcacagaaacactggtgttgtctctcttaggatggtctaacaaaagaaatttgaagagaatttgttcttttccggttgctattagctttaatcgctgggataataggttatttccctggtttctccactgtaaaactattttttctttataattaataggtatattttgagatgattaattaagatccaatttaagtatcctgggtttcatcctgcttttttttttttttttccattttttattaggtatttagctcatttacatttccaatgnnnnnnnnnnnnnnnnnnnnnnnnnnnnnnnnnnnnnnnncccactcccctacccacccactccccccctttggccctggcgttcccctgtaccggggcacacaaagtctgcgtgtccaatgggcctctctttccagtgatggccgactaggccatcttttgatacatatgcagctagagtcaagagctcaggggtactggttagttcataatgttgttccacctatagggttgaagatccctttagctccttgggtactttctctagctcctccattgggagccctgtgatccatccattagctgactgtgagcatccacttctgtgtttgctaggccccggcatagtctcacaatgggacctaatgaaactccaaagtttctgcaaggcaaaagacactgtctataagacaaaaagaccaccaacagactgggaaaggatctttacctatcctaaatcagataggggactaatatccaacatatataaagaactcaagaaggtggacctcagaaaatcaaataacccccttaaaaaatggggctcagaactgaacaaagaattctcacctgaggaataccgaatggcagagaagcacctgaaaaaaatgttcaacatccttaatcatcagggaaatgcaaatcaaaacaaccctgagattccacctcacaccagtcagaatggctaagatcaaaaattcaggtgactgtcttcttaaaagaatctctcagtgatctttttcgtcttagtttcacagttcaaacccctgactctgatgtttctgagacagactcaaaacttctttcattctcctggacaggaggttgtcactcatttggattaacacggggacccttcctctccaaagaaaaggctcatctaagtagattttgctaagcaagaacaattgctccactaatggaaacttagctctagtaggctttacttatttcttatttttgagatggtaattttgccttcccacttcattgctgctaaactaatcagccacttcaattcctgcaatataagaaaaaaaatcacagttcagaaaattctaaatgaaaatatactagctcaactgcatactgaaggaaaatggaggtaagttgacaaccttgagaaactgagatgtttggtgatagctagagtcaggtattgtaggtttccttcccctccctccctccctccctccctccctccctccctccctccctccctccctccctccctctcgccctcccttgcttcttttggagaatggattttaaaagacacccttcatcttttagagaagttttcagttgacagtgtaattgagcagaaggtagagattttctatacatcccaccgcagcaaccgtattatcagcagcgtctacctgaagaggactttagtaccactgatgttcaaacattaagacatcattatcatctagggtcctatattcactgaggttcagtctcagtgttgcatattgcgtgaatgtggacagatgtataatggctgatgtctgtcgttataatatgatgcagaataacccgactgcccctcacgtcctctgtgctctgccagtttatccctccctccccagctgtgagcactgatctcttttacctagatggtctggttgaaatcatacattatgtagcttttcacgctaacttacctttcacccagtaataagcaattaagtttcttctctgtctttgcatggcttgatagctgatgtctgtctagggctgactaatatcccattgtctgcatatacaactgtttagccatccattcacttgctaaagaacattttacttgcttccaggttttggcacatgtgaatcaacagccatgtataggttttagtgtcaagttagttttcagttcatttgagtaaataacaaggagcaggtgttggacagtgtgcttagaatatgtttactgccatccaaagttagctatgtattctgccagcaatgaataagattgctggattccgtttctctgcctacagtggattctatcagtgttttggattctggcctctccagtaaatgtgtatagtagtatttcattgtgaaaccgtatctttaaactgagaataacataaagtcagagagttattctaaaaacaaaatgcaatagcatgcacaaacatgtaacacacactagattccttgctttccctattcagttaaacttacatgaattccttccccaggttgtgttagtaaatctacacacactggggccccctgatggtatacattgttaaatgccctataggcctagtaagaatatacattcatggagaagatgatggatctttcatttgtattccattcctaactgtcctgaaccaaagctaatataattattgtataagaacaaacagtgcttaaatataactcactgatgagtaagatggttattgccttaaatatgaagtttagacttgtgctcttaaaatagtccatggtgcatttttctcttgctaagtgcagtgcagcagcaagagcaattaataataactattcttcatgcttataagaacacacatcctcgggccagactgctggatgggtttaaattatggcttcaccatttatcaactgagtaaccgagccattatttaaattctccgaaattctattatctctaaaaatgtatataataacagtaattgccaggagtcttattaggatggccaaatcagtttttatatgtccagtccttggggcagtcccaggcacatagtacctgctgtatcagaacagagatttttgtccatggaccttagagggatagtgtagttccaatataatactcatactacccagatcaggtaaagattggttggtcttggattgaaggccaatcttgttacttattttggattcataaatgtaaagtcaaataagcagcttttataatcttaatagccacattcattgattggcactcaattacagtttttgttttgttttttttaaaaaggcagtattttccaagcttattacatactaatttccatgtgttggaagtgtggggagcactatctactcagattatggtggaagcatttgacatatgatatatatatatttaatatatatatgtgtatgtatatgtatatatgtatgtgtaaagacagaaaaacataagcaaaaccaaaggagctcaactaaatatactatattgtaatatggcttttatgaatctagccaaataatagatatatcctttggtcaaaagtagaatatgaaatttgatgcgtctataatattgactgtaatatgacttaaacagtgtcttcttggtgaggaggtggaacctctccagtttctcagagctataaaaaattaagtgtgccgtcttgattgttatcagtctaagtaaacattagtgtaatgtccaaaaggcttaagatgttctgttcacagttctgtagatgctgccgtgcttgtacttggcagtgtgaacaccagattgagagattgctagggagttaagagcaggacgtgatattcctgtaccatgtgcccagtagtcctagagcacagtagaaacttacttcctaagaggggagacgtgtgcattctgtgcttgttttatggagcataagacagtgaacagacacgttaataaaccggcagccctgccagtcattctaagcacttaaggaaaagaggaaggaggtgactaatcagagcagagactatgcatttctgaccatctgaggcatctcccctaaggattatttgagacaattgatacttttgcgactctgggtgctgtggcctcagttcattctctttgggggaaggaagtgaaatgaccagcatgatagcaactcagatgttcattgcttacaggggaaagtaagtgaaaatgaactccttttctgtcttagttgggatgtgatcatttgaaaagcaccctccctgggcgtccctttatcaccgtttttcctatgtaagacaatgtgcacgcgtttcatgccgacaggcgaacatcctgccctttctttccagtcatagcagcatcttagtttgcagataatctgcctcattaatgaaaatcagaagcagcatggaatattttgtgcataattaattatcttggcaagaagatttatgaatgtaatttttctcaattgtcccaatcagacataagtgaagcaaacaaatatactaacactaagttattcatggcctctttatgcaaggcgatgtcaagggcatctaggagaattaagatggggcaggcactctgcttttaatacccagggtgcacctatgtatatttgtgtaagtttttgcagggcggggagggtaacagaattcactgggaaggttttatggttcataaattgaggagagtgcagccattatcagacactatcttccctattagctgcagccaagatggcgtctgagatgccctgtggatgcgtagcttcgatgcgtggagtcttgtgcctatgaggcatccgcaagtcttgtttgtgtatgaacacacacttgtgtttatttgtgtgttttctggcacatgccgctgctttctcatttactttagagtctgaatgaatgaccagcttaagttaatatgacacagcataggcagggttaagaagcataaaaaaattattctttaaatacataaaggctgtatataaggcaaaaatagggggtgtgggggagagttataattagcttggtgatattggaatctgagagtttggtccaatagcagacataaataacaatccatatgtagtttaaaacttatcatagacttttattttggcacattggctacgtctggaattcttttttaattccttgttagcaggaaatgtaaagtatcgtaatgtttataggagaagcttgtagttctgaaagcgataggtgtttgctgattagaatgcatgctgatcatcattgctttcagtgtggtcaagggctacagcacagggattctggggcagagggcacggatacctttctaggcttttatacttactaccaaggttattagtctctgtgtactacttttctttgtgtaaaatgaggctaataatggtagctatctatccatttcttacaaaaataaagccataattatgtgtgaaaatatatgaagtacatagtgtttagagcaaatcttcacgtgttcactctgtcattttcgagctacagtaagagctggcacgaagctgtattttagccagatcccagctcgtgtctaaactgctggatgtgttagcctcaccctatgtgcaagagaacaggagcagctgggcatccggcctagttcaaaactcatccttctctgcaaagtagttaaaaatcaacttctagtgctgtgaagaggcaccacaaccagagaagcttataaaagaaagcctttaattggggcttgcttacagcttcagatggcgagttcatggccgttatgggaggggatcgtgaccacaggcagggatagtgctagagtagtagctgagagcttacttctgattcatagaaactagagggggaatagaggtggccctggccctggcttttgaaacctcaaagcccatcccaggtgacatacctcctccaacaagatcacatctcctgatccttcacctcctgggaaggaagccttcaatactcaaaccaatggtggggtgtggtcttctcattcaaatctgtaaaccaatggtggggtgtggtcttctcattcaaatctgtaaaccaatggtggggtgtggtcttctcattcaaatctgtaaaccaatggtggggcgtggtcttctcattcaaatctgtaaaccaatggtggggcgtggtcttctcatccaaccttctgaactttgtctgcctttgggctagttctttagctcacttattatacttgttatgtttgaccataagttcattaaattcatttggtcactttcatggattactcatattcagtcgtgctgcaaaatattaaatgaaaaattccagaagtaaataacccaaaactttaacactgtttacagtatattattatagtagttccatttggggtgtgtatatttgcgatggggaagttcttctaacaactacggttagaagtaaagctgtatatgaaatccatcaaattgtctagcttaggaatagggacggtgatgtgagagtcaagctgtggtcttagttctattgtctctctatctccacacaggggtgcagttggacttccaggttcctaagagtgtgtcttagttacagttacattgctgtgacaaacatgactaaaacaacttggggaggaaggggcttatttggcttatacttccatatcactgttcatcatcgaaataaatcagggcaggaactcaaagcagggcaggaatctggatacaggtgctgatgcagaggccatggaggggtactatttgctggcttgctccccatgacttgctcagcctgttttcttatagaattcaggaccaccagcccaggaatggtactacctaaaataggttgggccctctcccatcaatcacaaattaataacataggcttgcctgtaagaaagaaggcatttgtttgtttgtttgattttcgagacaggtttttctgtatagcccttgctgtcctggaactcgctttgtagaccaggctggccttgaactcagaaatctgcctgcctctgcctcccaagtgctgggattaaaggtgtgcgccaccacgcccagcaagaacacattttcttaaatgaggttccctcctctcagatggtgttagcttgtgtcaagttgacataaactatccagcacaaagtggaactgagttgtgtctggagtactatgtattaggtacctttagccctgtgattcacattgtataggactctatcccctttcctcaataaagagatttttccattgctctgaatttccccacaatgagctagagttattattgaaagtaatattcagatctagagactttttattcattggactatgcagctttctatcaagtaggtgtagttaaagagcctacctagaaacaaaaataaacaaacgaccccgcaatttgagggcagtgtggaaaaggagagggcccttggtatcattattgtggaatacagatgtgaaaggacattatatgctaatataaacagaataattaagtagatggctttttaatgtaaattctagatagggagagtatctgtgagggtatttataaagtaaccagtttttctcgtgacaaacagttccagccgcctgccacctgtcaccagatgcctaggatttgagaatctggggagataatgatactttcctgctgacttcagtaatttgagaaaggctttcaaattctgcaaaggaatgtgactgttgtcctcctcaatcttgaaaccaggcccccagataacaggctaaaaattgaatcaatttaaaaatgtttctaaaaatagaaactcagtacaaaatttgggcaacaaatctaggtgttaacttcataattggcttgactgagattccataatcaggcacaacaggaacaaagtggtttagactgtcccattctgctgcatggacaggtgttatttatagccaagggaaaaggtgaccctgggcaaagagcaagtgtcttctacagggaagtctggattgattactcataactgtcttgtgtgaaggtggttgaatggttggcttcttgtggttggctgaaacgctaccccttgtgacaagtgtaggtcagcctgtttgcacattcagctatcgagaagccaattcagaccaggtgacgtgactgcgcagcaataatccagctcccaagtcctgtggtacagagtcagcactctgcctgtgtgtgtcccctcttctggtggacgttcccacctgacgtggcaggtgggtttctcaagtctgcttatcgcctcgttaagcacacagcacatttgaccagattgcctaatgcaagataaagacaccggtttcttctgctctaagcaaaagaaagaagaatcaaagtagacactggaactgtgacacgggctataattgcaaacatgttggtgtttctggtaattggatggaagactgtcgaaaatgcttgggccgaggaagataaaaaacaaaacaaaacaaaacaaaaaacacagaaaacctgattcccttttcattctttgccaatttctttttctcttttctttcttttttctttctttctttctttctttctttctttttttctttctttctttcttttttttttttttgtctgaagagtagctggttctgtgccaagaagtgttctgtacaaggaacagaaaaccaaagtaatttgaagagatcattatttttaaaatgtgtttctgttaagatggttggaaggctttttttttttttcctagcttgcctcccctagaatagtttcaaataaaggtaaaaactaaacctcatctcagtttctggaacaaattgcaggagagagaaacaggttgcttgtggcaacctggtgcagggtttctggcttccacggcccttcaccctttttacctctggacttttcatctttgaccttcacaggacattgtctgctgcttatgtcctctgtgtttttgactgtgtatcatttgcaaaaatagaattctcagtttgtgagctgacggtcacctctgcccatggctgttgtctgagggcttgactcggactcttccaccgccttctctaactgcagtttctgttgaatcccctgatggtgctgtcatgtttgaatcagaccttacgggctgcagtcttgccttactgtttaagttttaagaatgttcatagacatggacttctccataatcctttgcttcaatagaagggtgtgatgggaagaaagataaaaaactagatcagaaagcatggaatctgaccagggctttattgcccctcactcactggctgcatgaaattaccatcttttccccttactttcttcattcatttctttcagtgggtgtagttgaggtagactgttcagcggatgagcccttccttgtccaaggctagcagacacaccagtcttcaacttcctgcttagttcttaggctgattcacccctcccttcaattcttgtataccctcagttccccacactgaaacaaactaaacctccagtcaaagaaaagcgtagttttaaaaaagctgaagtgaatatttttgctgcatctacagaggcatctaaaaccatcttctaatacttagctgatgaggtcagtcaacttctgccaaaggctccttatatttttgccccgatgtataagtccctgaatgtttactgactgatacctcactccacccttctcctggctctgctctttaaattctccttagttaaatctgtgtcagtcttcaaatttacacttaacaactaaagatactctgagtttccttgactaatgtagccaaacaaataaaatgtctttaaatatcccagtggtcattggaagagttaaaaaaaaaaaaccaagtatttaaaaagtaaaaaaccacgtaacaagtgaaaaataatatgtattatttacctcaacatatccaaacagaattttgatagataatgagtggtaatattgctagtgaggtatttgctctttttaaaatatccaaaacctgtattctctgatattcactttatacttacagcccttttcaggttagactgatcatagctcagcctgtgtactgctggtggttactctcctgggcagtgcaagtctacctacttggcagaatttttctaccactctttttaaactttagagataattcttgatttttattaatattctgatcattcttccttccttccttcctttcctcccttctttctccttccttcctttctttctttctttctttctttctttctttctttctttctttctctctctcttcctctctttctctctttctctctttctctctttcttctctgcatgtttattgtcccacttctgtctgtcttccaatggatgtcttagccacccaaaagatctgtcctatatcttctctgactcggccctgcctcttccaaagacctagaagccatgtcaaccaaaagagtgattgtaagtacacaacttgaggcaagccggatggtagggccagagacaggcaagggaaagttttcctttctcccctaccttgctaactgatacacagaaccaatttccagtgagttctctgaatggtttccttttgttgttctctcttcctccccataactctgtctccttttgtggtactattctgcagaagtgttcattggatggattcatcactcaagctttttggacagcaactgatgcaattcaaaggcttataaaaaaaaaaaaaacccttggaatagctgtgcagctgtctgtagtaactacttgtgggatgtaatgaatgattgaccgggtatcagagcatggtggtggatattcttgtggctatttggggtgtcttattttagcctgagaactctgaacctgtttgtgtgcatctcacagcacaggtggtaaacctgatctacgtggccactcatgtgtcagaatgcctcatgataagatgtaatgtgctaatgatgatctacttacttcaagcattcataccaacttgtgtttctccctaaagtgtatctggtcagaaaaaaaatgtgtagaactagaatcataagttttggaagccaggatgaaagctactgagtatcacaagagttttctacctccaacgtgttgcttagtaggtagcttttgaagggtgaaatagtgtcagcaagaaccaaaggattaagtcagtcagcactatttaaaagtcaaaacaagctgttgcagcagtgcagaccttcaatcccagtacttggggaacagaggaaggcagtggaagcccacctggtctgtgtgccaaggtccaggccagctagagctatgaggtaagatcaatatcaatagaagaagaaagaagaggaggaggagaaggaggaggaggaggaagaagaggaagaagaagagggggaagaagaggaggaagaagagaaggaagaagaggaggaggagaagaagaggaagaaaaagaaatcacagaatttccctccctcgcttccttctaggtttcatcatctctgacatttgttagatgacaaatatttgactcacaaattaaataggattatctgcggctataggcttctcacctgttcagggagattaaggaacacctgcttcctcctttgtttcatccacttagcgtccatattagctggcccacaataaaacattcttgagatgtctacccccaccccaactctagctaggaatagaaaacactcacttctggtcctcaacaactaaatagtctcagttagttattctcatgctctctttgaggaaaaccccccaaaccactcctccgttcacatttctgtaagcactcgctggcgttgtaagaaattattttatataaaagcaaaataacttttagtgctgttctctaagtgccctctgtgggttcttctatgtatattgtacttatctagttctaattggataccagaaaaatggtttcaaggaactataaatatataaaaatactatatacatacatgtctatataatgtgaaatatatatatcacatactttaccaatattaggaagaaggtgaatttcatataaaaatggctacaggataaatgtggattttttttttgttgtttgtactgataatgggctaacattttggtaagctgaagaaaccctgttgctccgtaacttattccccattctgtgctggggaaatgctgagctagttcagaccttctgctctcaagatcagctgccaccccagctccccgtggcccacaggcatctcactggggtgagcctctaccactgccatctgcggagcatgaggcacattttcagtttggaactttagacccgacaccctttcctcagcctccggcttcatatatcccttcctgttacaggagctggaagaaagcccatggctgtgcagacaagataactggggcctcagaaagacacagtatgactcttggctctgcccaccattttgagcggactgccaattttcatctttgaggttggcaacagtatccccagacaacagggctgaaagactgtaggtgacatgagcatagtggcggggcacagcagaagagcatggattttggaattatgtacacttggggcagatccttcttctgctgctaccatctgtctctagataaacggcttcagctctcccaattcatttacttcttctgtacgtttgtatgattagattgctcttgttgtggacttactgagaaagacgaagacaatgctctcaaagcaacgagccacacatctagtttatagtgtggtgtcttacaaattagtcattctgataggattcagggataatgctgtacagaagcagatagtgcaaatctagctgcacttcatttgatggatatcaaggttcttgtgttcaggagtcttaagtcagaagtctcacatcaagttatagtatctcttaaaatctggcctcactaaaagtgcaacaccacaaacttaatggtagagtgcttgttcgacttgtgtgagatcctgggttcaatgtcagcattcctccaaagttaactaattaaaaaattaaaataacaacatatttattactgcaatcaacctccacaatatctgttgtcttgacactgtgtgtcatgtgtcctgagtcaaccgtacatgtatctggtacccacgtcctgttcttacagtctccatggggtttcataactgtgccttttcattcctccgatttcctccagggactgcaaatgaaatacgtttgtattttctttttgtatactagaaaatatgattccacataggctgttcaatatctttaactggatctgtgtaactatatccaggctcatgtttatatagagaaaaaacgttatatttggaaaggaagcaagatgtatggactgcatggggacgcactgtggcttttggagaatatgctgactcatttctcatgcctcataatccactgagctgttaagcagcccttccctgggctcttctctggttatttagtccttttttgcccttaagcattgagaggctgaaataaagagaacattaaatgcctagatgatgttaacatcctatataaattagcgtatgtagaaagagatcgaattgctttgttttgaaaggttgcactactgtgtctgcatttaaatcgtctatcctgatcatttacatattggtcctttcttctcaccccttccccaggtttcttcttggtttcagaaagcaataagagatctgcaggaacagagtctgggcgcatcactttcagacaacagagagctaatctgcaagcacgaggacctgatagtcaaagcaaaggtaaggtccactaaaatgagtggggaatgcaagggagatgactcttggaataggctgagtcatttacagattgcatagaaatgatcactagagcgttagggaacgccactgcccattaactgctagagtaacagtaagactgaagcttgtaaacacacacacacacacatacacacacacacacacatcgacacactaacaggtcataattattgtctagtctgagtatgagagacgctttatttaaatggtcacagacccctgagaagtttaccatttttttttttaaattggactgaaacaaagcagaggctttgacaaacaaagagagtggcttcatcaaagttaagtcttatcccaggcagaggtggaatttgattctgtccaacccaaggtcccagctcttcagtattaagcttcgctgtctttctgcagagtgtttctttgctggtgtgatgttttgtttggttgttttctgcacatagcaccgtcacctcgctggttgccaggcttgctcactgctctcatcttcattctctctctctctcacttgcttcacattcctccattttgcaagaaattgactcctagccaggcatcacttacagatggtctgtagagaactaaagcttattttggtgacccagtacaggaaattacacctagaacattgtaggtggttggtagttacaggttaaatgaagtcatgaaagttgtgaaacacttgttagttggtggcaaggaagaccaaccatatactcatttgagactgatagaaggcttgcagggatagactgtatttaattagggttaaatattctaaggacatgacattcttagtttcatgttactttcttgctgtgattgaatgtagaagtctaatctcaatgtttaagtgattgttaaaacatgcagttatgaaactgctcatttaaaacatggtcagcttcatttgccagttaaggttttccactgtagtaatgtagtaatttattctatatgtatcaagctcaccctttatcagtgagaatgattctatccgtatccttatgtattaagaaccagggatgattcaatttgcataggataccgacttttaaaaacacaggaacaaaaccaacatgttcctgtaagttagacgcacttgggtttcagtgactgtgcatatgaagtcatgagagttgtttagacttgaatatttgttcacacattactttggttctaggagtgtactgtgtctgatgttcacagctcacatttgaaactatggagtgtataaaagaaaaagggccatgaattagctatgtaagaaacactgatgaacacatttgtttctgttcacaatgtcaaaattatttggataagaataagataagctgcaacaatgtcaaaggcatgtatacacacacacacatacaattatctgcatataattgttatatatatctataacaaatacatatatttatgtttacacacacacacacatatattctctgtaagaatctctgtatggataagatcatgtttaacagagctggagaagctgtgttggctatgagtcaagccactgaaagaccacaggattgaaagagaagttatagcctagctcaatccccagccggggaagaatgacatacagcctgggaaagctatcaggattgcagggctggggtctcaggtgagggtctcatgatcttctctagcctatgagtcctgatctcaccagagacttcctgtaaccacagcaactccggttttacatggcaatggttatgacatggttggaagattgaatctcagtagactcaacctttctagggcttccagttgaagggaccacaatgcttactagctacttcatgccccctaatgccttacccaaattgctggtcctacagagggggccagctccccaatctgtgaagcccagagcaaaatgaaactataaaggcttgtctgaacaagttattgagaatgccagcttggtgatgtcagtgcatgtagccaggcatgcgcccttcaaagcacagggccagagaggtcactccagtcagctgactgcagagcagctctgtacacagcactgggtgagcttggggaccttggccacttggagattttcctcagccacttggatgatcgtacgtttttaaaggcagtatataaaagaagacccatgaagcagaatgtccctagttctgatctagttcttcctccccctaacccctgactagcctacgttcaggggctatgtactatgtggtgtgatgggttgtatctatgtacatcaaataccaaaaccaaaatactacaacaaaacggggtttaagttcctgctgtatcattcagaacactgggaacacactgcttctccacgtctcattttcataagcacctggaaagaggaaacttaaaaattctggagaaaatactcgcacaagcacttacctgaagtggtaagtagtacttccaaaatgttgtttgcttttccatccttctgccagactatcagatggttttcaataatctcattcctttgagaaaggattcgatttttatatgtcccaaataggatgtagcacactgcattctggactcacatttgcgtgtggacatgtggagaggaactttcagaaagaattgatcagaaataaggcatcaagtggggggccattactgaaactcacataagtaatcaggtttaccgggagggtaggtggctgtgcttcccacggcgagacaacccagcgagtcttttctaaataaattgcaaaaatgtctccattgtttcttgctggaatacattcaaatcaagaactggagtaacatccacagctctcgttagggttcagggtgtgttgaaatagttgagctaaaccttgaaagatgactcgttgtttcagctagctatgccatctttacttagtgtaaaattttctattcatgtgtataactgaaaagggaatagcaaatgcagatgatttttaaatcctccttgggtgtcaccataagtcaacttgatgtcccaaggcttaactgcagcttttgaggccagaatcagttacatattccaatctgggctcccatggtttcaaccctccattcagtttggccctttgcagttgatgatgtgctgagtgttgaggcccaggcttctcagtgctggctactcacagagtcgtgagaaatgctggaagattgttgacatctggatctcagtgccagagaatctgtgtacttgtttgggtacataaggcttaaaaatataaatagcaacgactcactgtcaaggttaaaatattagagtttttaaatttaaaaaatacacaacagcaacaactagaacagcagcagcagcagcaacaacaacaacagagttcaggctcttctaaagccttaaaggtctcaggggctgcagaggtggctcaggggttaagaacacttgctactcttgcagaggactagggtcctgttcccagcagccacttggcaacttagaactgttgataactctaattacaggggacccaatggcatcttcttacattgcatttatgtgatatacttgcatgcattcaggcaaaatactcatacacccatctaaataaaataaaaataaataagaccttaaaaaaaaaaatcaaagatctggcatcagcaagcttgtcattccacataagacaaacaaggttttggctacggtccagtttttttggtttttttgtttgttgttttgtttctttagaaaagccatgcacacccaagaacttcccccaaaacacaccatttcccctttaatggttaataagcctcatcttcctacctgttcacatcttacacctgggagtaagcatcagactttgagagccagtgggcaatgagataccctccaaacaagggaaccgactctgctggagattgcactgcaggcagtcagcatcaacagatgagaagggaggctgaaatgagaacagaagtgactttagagacaggccctaggctctttggcggtgcaggttattaatctgcatcttctagggagacttatagccatgcagtgtgtttctcccatatttcccatcaaacctagagatagagcctgtgtgtaaccattcccccataaagacttatactcaggctggagagatggctcagtggttaagatcactgactgctcttccagagatccagagttcaattcccagtaaccacatggtggctcacaaccatctgtaatgggatctgatgccctcttctggtgtgtctgaagacagctacagtgtactcatataaatgaaataaataaatctaaaaaaaagaaatagaaaaaaaaagacttatgctaaaatttacaagagatttaaaggttttattcatgcatgcccacactctcatggttcttacggatgagtgtatattgattatattatgtatagttgtgtgtgtgtgtgtgtgtgtatatatatatatatatattcttatacatatttatatgtatatacatatatatggttgtacatgtatatacatatatacatacatatggaagagaactgaaaatggatgctcatataaaattatgcacatgaatgctcactgtagcagacaaagggtagaagtaacttagatatatagataaaatagagtagtatatccatataataaaatatttctcagccctaaagagaatgaagtattacaccacagagagaacagacctggaagaagccaaacataaaaggtcagtttatgtaaggttcatttatgtaatacgtacagaagaaggaaacccgtagagacagaaacaaatcagtgtgggtaggggtggtgaaggaggggcatattgactgtttaatgagcccgatttgtcttttgggggctatggaaattatctgtgacacacaacattgtaaacttactaaatgtcactaagggtaaattttataatccttttatttatttttactgccattaagaatccatataccaagcactttgataaacatggttgcatatgaacacatttaatccttaaaccaagcagacatgtaggcagcaattactgtcccacttttacaaaaagagaatacaattgggtccaggtattttgttgttgttgttgttgtttgtttgtttgttgagcctgagatggcaccagaaatacacaaaggtgttgaattttacctttaagtcttatacttgtttccaataggaagaaatatatacaaatccacatactatatatggtgttcattttttaatttttttattttttatggtgttaatttcctatgatcagttttgtatattttttttcacaaaataaaactgtattgttcaattacaaagacagaatgagaaagagattataaagaggcacttatactggctgtataggtggcaattatgcatgcaaattattcaaataaacttgcaggaaattctactttactttcttgtctcataatagaaaactttgaagctgggaacaaggtactcaccaattgcactttgaataaagtttctgtgggaccacagcactggcccttttcacaagatattcaaatgacattatttataggaacttggggccaagatcacagagctagtttgtgaagtcaaccacaactggaaaatactttttcaatgacttggaaaaccagaccagcagatgactcacgcaagctggccttaaccgtgaagctggtgaatgtgaacactactgtagcaaaatgtgggagggtgtgtgtttgtacaggttgcttctgagaaagcatgtaaagaccatgtgtgtacacgcacacaggtatgtattatgtatgtatgtatgtacgtatgtacgtatgtagaattgctgttatatgctgtttctgtttaactcacttgggggtcacctcagtgttttccatatagatcattttatactcaaggggtccagttacacagtgtcccccaacacttgccactttttgttttgtttcatcatcctgtgtgtggagagctaattgatggagacttctcgcagttctcttgtagctaatgactttgtggccttttcacgtggttgttgtctattgtctttgaggaaatttccatataacccctctgaccatagcacccttccttgagcaaaagtttttaatttttataaagtccaatttttttttaaaatgctgtggcttatgggtttgttgttttgttttgatttgatttgatttgtttgtgtgtgtgtgtgtgcgcgcgagctatgtctgctaaatccaaggtcacaaagattactcttgtgtttctctgaagaatgttgtagctttagcttttggatttaggtcattactctgtatggcatagattctggtatatggtgtgaggcagggattgactccattctttctcatgtagttgtctagagtccctgcagtgcatgaatcgaataacacagttttcctaatgaactgatcttggcgcctctatcagtgactgcagatgttagggcttctctctggattctttcccctattccactgttttatatgtttgttacacttatgtgccacatcactttaatttgaaagaaaaagtaaaaatttgaagtgtaaggtctcttagtttgtttctatttcaatgtttttaaaggccattttggctcttccaggtaccctgcagcttcatgtgaacatttgaacagccttccatttcttcctgtaactccctgaggagtctggcatgaattacttagtatctagatatttggaggagtattactgtcttaatttcttttttaaaatttttttatgttatgtgcctgggtgtttgtctgcatgtatgtctgtttaagaagagggcatgggggcctggtgagatggctcagtgggtaagagtacccgactgctcttccgaaggtccgaagttcaaatcccagcaaccacatggtggctcacaaccatctgtaacaagatctgacacactcttctggagtgtctgaagacagctacagtgtacttacatataataaataaataaatctttaaaaaaaaaaagaagagggcatgggatcccctggaactggagttacagatggatcatttatcactgtgcaggggctgggaatcaaacccacatctgttggaaaagcatccagcgctcttgactactgagccatctctccagtccctagtattgccatcttcccaatattacattttcatttatttatgcttttactgcatctctcccctctttcaacaatgataagtacatttcagtgtacactagacttatacttttccattaaatttatccctggctattttactctttcttctgttataataatagaatcgcccttctagttcccagatttgtcattgctgctctttagaaacgcagtggatttgggagtggcagtgtatgagctttgggagggtttgaaaatcctcctggattttctgtgtgtaagatcatatcatgcacaaacctcctttacagtctttggtatgctcacctgtctacttggaacaaagaagatcgcttttggagatctgtagaccaaaggttctcaaactacaagggaatttgatctatcaggtttaggatgtagttgcagcactgtctgcatttggagcaaactcctatgagtgctgcagatgttgatctttgaaccacactttggagtcaaagatctaaagaaaaacaaacaacaaaatcactaccacaacaaaacaaaaccagtggagtcaaagacaatgtaagttgtagagttctcaaagacagcatgaattgtagccattgttagaacataccaggtgtaaatttacatctgtcttagattgatacatatgtttatgagtatttgcctgcatgcaccttgtgcatggcatggctgatggctgcagagatcggaagagggcatcagatctcctggaactggagttataaatggttgtgagccaccatgtgggtgccggaaactaaacccaggttctctgcaagagcaacactgctcttacccaccaagccacgatactatgaatctaaatagatccctagtccctgaggttatggacaagattgtccgtgcttgagacttggtttctttttgcttcttatttccggtccccgtggaccctttacatgggtgattgaagatcaaaagataaacattcaacatttctgattattcctttaaaaatgtaggggtaaggagtggggatgagctggaaggagttgggagagaggaaaagcatgaccataatgtgtttcatgagtgaaactgtgttattgtctcctgtaagtgccacagaaatggaacattcagtacaaaggaactacttgtatatttcttcagtgcttcaggaggtgtggggaaatatccggaattcaaataaccagtttccaggttatccaaatattttcccaatatttcacaagcatgaggaatgctttcttctcatgcctgcatatattaacttatacgaagaaactcagcattgcaatgttgaatccctagttattccctgatgtccttcactgaagatcacaacatttgtgaagttatgataaaaacagattccttccttaaatcaatccacaccgtcatatctgatgactgggaagaaaaccctatcaaagggagtagaatctgcttcttttgcacagcgttgtctacattgaaaatcaaatctgaactgtctcaaggcaaaattagctgcactccccaaaccttaagacacctgcatctgcacatctcagtccctctgaaccctctgtcttcatctcagtgagtgattagttttacttgcctgatttttaaatgaacctcccaattataagcagatgtcatttttcacagaacataaattagaaacaattccatcactaacagtcacaaatctgtataaatagtattgagtttgccagtgagccttgggaaaatccataaaacaatgagttgggtttttttttatttcttctctgtaacccagttcttgcttttacttggggttagtttcaagctcagtgagccacatccttttaatttccaaggcaaacttccattttaaaactcactcagaagtatgctgaaactcagaatactgtggtctgaaattgctaggctggagccatcagccctggagctcccagttcattctgttttaaatgcctatacaagatttgattgcttttgagtttggttttcttttttgcctcctcttcttcccgattccttatcattggtcagtcattaagtggaaactcccacaaagcatggcttcttgtagttcctttttaaatgatgcataaccatacagtaacagtggaataaagtacccttcaagtggctgcctgcaaaggcattttctcagtgcttaacatggttatgtcccaaccttctatgaccttctgtgttacggtaatgtgcaattggtgagtccctgtttcccagcctcaagtccccttgatgtactttgctcttgaagcctatcccttatttctcagccttatccagagctgctgtctcacagactccatgctattctggaagattccaaaacaactgccatagttcttttggttggatccactaacgttttatttacgtcattcattttatcttgtgcaggtgttttgcctctatgtgtgtctgtgtaccacatgtgagcctggctcctcaggaaggctaggagaaggtattttatcctctgggactagagtcatagatagctatgaggtaccacgtgggtactgggaatcaaacccaggtccctagaacagccagtgctcttaactgttgagccatttctccagccctgattcttcattcttaacttaccctccctcatttctcagtcatgtttacttcctgcctcttacagtcctcatttgccttgagcactgtcacctgttgatttgaagcctcatcttagacatctctgcccatagaagatgcttgtgagagtcttgctctgggtcagctgcttttctcttatgatccagaccccctcatcccaccatgccttaacattgtgctctggccagggctgtttcttccacaagcaccatcccttgccttcaatccagtcccacctccaagctagaactcctgccatgttcaaagacccgtgagaggccatctcagatactctaatcagaaggacagtcctttcctttaaacatttgcttggttcccacatgagctcacagcaatcccttttttattatttattatttattttatttatcccttttttattatttattacttattttatttatttattagtcagctgtctctaggagatgctgaaggatgtgttccgatttgttccctactcagtgtgagagttttacaatgtcccttccatcccagtgtcatttgccacctctccacagatgattgaacatagagtcagagtgctatggttctactgagtcaaaagctgcatcagatcctccagaaggagagattcatggaggaaattctagtcttgactacattttgtttgaaggtggataatgtctttcataccattagaggcaaggacttgttcctataatgaagagagaaaatataaatattctacatacaaaagttttacaggaaaagtttaaaataactaaataggtattcagaaaagtttaggaaagaaaaaactaaaaaaaacattgtatattttttcaattttcctattaaatccatggctcctttgcctaagacaatgatgtgaagaaagaatgaactcaaatatgatgtgtgaatttcctacaagtcgggtacagaggagagcagtccgttctgttttgggaggagtgaaatgggaaggacgatgcttggatcatttctagaattggcacatggatgatggctaacattatatcagaattatcacacacacacacacatacacacacacacacacacatccccccaccctggcgcatcaagtcatcagagatattttaaatttatgatggatttcgatgtgagccactcatcaagaataaagacaaggagtttacttgcccttgtgtcttccataacccatttcaaatcttactggatttatcaaatacaatctgtattttaggtttataattcatgaggcaatagcataattttaagagtcaagtttgctgaattttaacactaaaactaccatgattatacaatccaacatccgtttatcagtaagattgtaaagacttctcagccagttgttctggttgaatatcccacatcgagagtcttgacatttgactggttagaagcattattgtttctcttcgacttcaaataaaacttaagcagttttaaaaataaaaaatttccaccctaccaattaaaattatgattgatgccgggcggtggtggtgcacgcctttaatcccagcacttgggaggcagaggcaggcagatttctgagttcaaggccagcctggtctacagagtgagttccaggacagccagggctacacagagaaaccctgtctcaaaaaacaaaaacaacaacaaaaaaattatgattgagtggatatgagatgaacctaaaatatgttcttaaaactttcccagcagatattaatggatttacaaccattgttatagtttttaatctgttgatcattatgggcgaaacacaagaagcctaccttctattaatttatttcaagaagggggattcctatatgaggttgaaatcacaagctcattatttcctctatggttggtttgctcttggacactcaagaagtgcccagcagatcctccaacaagccctgcaggccattaacaaatctacttcactagcccatgggctgatatgattgtagataaattatgttcaacaaaaagtattttggccaggcaggctttaattaattttgattgaaaatagaaacaccagtctgaataaagtcgtaatcagttaggaaaaaaaatatttgaagggggcaaaaaaaaaaaaaaaaatctaaagaatacggcaaaagaggagccactggagaaagggcggtggttctcagaaaacatcaatcttgtcctgccccaccccgattcctcccatgattaaaaccctaaaactaagggcaaacaagcggattcactggaactctcttctggagatttatttatcacgtgccttactgtttttacaatttgctttcaaaccttacagtgtcacatagccatttacttcagtgcaggccataagcacctgtcctgcaccgctggactatggggtccactcagggatcaaacattggagagtgaaaaaaaccaaaaaccaaaaaacttgcaagccgggaatttttgtggggagggggaaacagaaggtttgcttgttttgttcttgaaatgagagaacagtctaattcatattcagaaattgatatgggggtatctgtctattatagcatatcagtcccagtcccagcgggttatttatgaataattattctgataaaccaatttttgggagcacttcaaattcgagaatgtgaagcacaactgatgagtcgttgaattaacacaaatcgccccagaagcgggagcacccaccaagtgttgccgccgccattgatttgctaggaaagagaactcaaaagcaaaagttttgtctggagctatttagcaagtttggaataaaaaggtttttttgggggggcgaggggaggaaaggcccaccatttccagagttctctactgaaagggtaaactgaacatttctttcaggcataggtgagacatcgttctttctgtaagtggaccatgcttttgtagcaaagtgcacagacgggcatagttcacatggcctctaggcactgcactctgtacgattggagtgtgagggactcctttttcgctaggatgaccctacaactgtatgggtcagcctggaaatgcctggaagggagcacgatgagggggaacctgtggagtagttactatccaactggacatcatcagaactcgcgctttctgcctgctggctgccattcttccaaagcataaacatttctttccaaaaaacacgcctgctcaaagtcgactttaaaatgttctctgattgaaattgccaggtttgtttgtaccatctctaatgcaatcatgtaaaattctgattttctgtcaatgagttaatcctcctgacgcagaaccaaatcggtcatagagttgggattgaacaggaaatggcgctgcgtgcagtaagatggccttggactccaacgagctttgggagtgatccgtgaactcaacttgtgcttctgccccatctggttttgacagtgatagccagagtcagttgttctcaggctcttacacatgcgtccccttttgcgatgtgtctgtctcccctcacctcacaatcacattcccagatcaagcacgggatgaaagtgcggcggaaggtgttgcattatatgaccttcccctctgcggggaagttttgtgtgaagaaaagcttattaatcatgttgcacttgttacttcttttgcttttcaaattggactcatggacgtattttactttttcagtctacttaatggcaatctataacttcatttgaagatctagtctaggactgtaacaaagtaaaagaaagaaaacaaaagcaatctttcccccttcttgtctagccacactaatccccttttaaagtaccctttccatcaagggaacccagagaaagcacagtttctacggcaaatgggatactgagtggtccaatttaaaagggttactaactgtgagtgataaatgaaagtacggaatgacccagagagacaccctgatatactgtcactcagctttattgggtcagggatatgcacgtgcgtctgtctaattggaaagccagggaaatggcagaccttggcttctgctggtgggggcgcacacgggaaatgttttattgcaaagtgactaaaaccctgtaagaagtttaacacgtagaagacagcgggaatggctcagcgaaagagaactcagggtttctccattgcattcctacagccttgacaaggttggcaactatatgtttttttaaaactgtgatggaatcagatgactctagaaagttctatcttttaaataaataaataaataaataaataaataaataaaacagttaaagtgtcccctcagaaaaatgcctggggaaatacatcattgcagtggtatagaagctaagtagaaagtgcctgcagattgcccagagaaaacagagccaattttcagagaagattgaatagaatcgtgaatgtgcccagcttcgtttaatgcccacagagtttgtgtaagaatgtaattaagaatgaaaaccgataagcagctgaacctggttcttttgagtttctccggaaggtcagggcccactctttctagcaagattcaaaatagcaagtgacagggtatgtgtgtgtgtgtgggggggggggcagtaaagcaaaattactgtttgggcagtaaattttttattatatttatgtagatatatagattatatctataatagatatagatacagcatttgtcctgtgaaatccttttattatcacggagacctcttcagggccctgtggaagtttaaccatagcagctctctcgactaatatggtaaattcttttgagatgataagaaaaatgctgtatcatcctctgtggagagctgggacgaggatggtaccctgactcagatacccatgctcaggtgagcagcctcagcctgaccatgggtactatcccaggagtacgttctaactccttttcttactggtgctgagaaacttggctagtgtataaccccacgagttctaattacactgtggttagaatgtggataacagcttacgggtaggtgggtagatgaagattaaatgagatgatacatgaaaagggattagctcagtgctaccgaataaaggcaaggcagtggttaaccctttgttggtgtttgtacactgtcctaaagctatgaacaatggctatgaaccttttctccgtattctgattttgtctgcattttccttacacccagcatgctaagcaatctccatcttctgcatttatgaagggtttctccttgctaataaatggagagtgttctagtcaaatccaattacaaaaaaattaacctgtcttattctgtatcttcattcatttaagtatctcttcaccttagttcaagattaattagttcaagatcctaacaggttgcaggaataatggcacaaagacttgagatggatcaagtgggtcgttaagtgttcgaagaaagaagagggctgaagagatggttctgtggctaaagtgcatttcaagcaaagaaatttagagccccagaactgcacataagtggcctataattgcagcctaagaggtgcagagagtagacccagagaagagactcgttagcaacagccattgtatcagtgagctctggatttgattaatacatcctatctcaatgagtaaagtagaagactggttgaaaataatcctccttaggcacaggtctctacatacacccacagtcgtgtgtccacacatgtgtatccatgcatgctaaaagataccaatacgttcacatgcataacacaccacacatgcatacataaaaaatggaaagaaataagtaaaaagaaaaaaaggaaaagaaaagaaaaaagaagtgaaggggaggggaggggannnnnnnnnnnnnnnnnnnnnnnnnnnnnnnnnnnnnnnnnnnnnnnnnnnnnnnnnnnnnnnnnnnnnnnnnnnnnnnnnnnnnnnnnnnnnnnnnnnnnnnnnnnnnnnnnnnnnnnnnnnnnnnnnnnnnnnnnnnnnnnnnnnnnnnnnnnnnnnnnnnnnnnnnnnnnnnnnnnnnnnnnnnnagaagagaagagaagagaagagagaagagaaaagaaaagaaaaggggaaaaagttgggttagcaggcaaaccagtaggcagttcgggtatgtttaaccacatctacctggacaattggactcctgagatgactagcaaacaaagggttcttttgttaagaatgtttacccaaatatttccaatgacattaccttccaggaaggacttggcacacaccagcatagcagccttttgagaactgcctagacacagaatcctgttccccttaatactgtttatcgtgctacccaataatatttgggaaacatcccattacccttagcttagaactgggaaaaagtgaaatctcattcgcttttgatctcattgatggagatcaaatattaagtgttagaggcctcgatagaggtgtctggaagaaagtgcggccatacttggtgagggtgtgccagagactgccactccaagaacacttgttccttctcaacatgtctttgctggtttggaagcaggagggctatttaccatgctttagacactaataccatgaaatacagttttattcaagtagggacacaaagatctttgttaaaatcttgagaatgcttgtagcacaaagcctgcctctatgaacacagcttttctagtcagtgtgaattttggagtatttagaatctgaaacgtcaattctctgaaaggttagcatggtacagagacccatgagctagcctctgtgggtctccttttgctatgtcaacatgtggaacatacttttctgagcctgtacgaatactagaataaaaacaaagctaaacaaacaaacaacaacaataaccaaaaatacacagccaaactgaggatttttgaagattatagtcataagctacacttaagacaggctcttcccactcccccccccccacaccaatgctaattccttaactaaccttccttattttcatatccctcaatcaaaatagttttctgttgaataaataccgaaactggttccatggtcatcacaaaagaatgtgtacgcttctacgcttaaggcccattcattctcgctgaaaatactgccatattgtgtatgtatacttaatatatttcataatgagagaatataggaagttgtatgaaatatcaatttgcatattgctaagaatgaagctacattttatccttattacaatcctagattatggcatgtatgtactattcattgtgtcgtgtgagagtaatggaaactgtaataacacatgaccctaaaattagacttattttataccacacaatataaccaatgtaatttaataacagggcaccttgcatagcagacatgccaggtagagccaggctgagatgtttgaagtccgatgttacatttcttgtgcttcacaaactgctttgtgctttactcgatgtcatttgagatgggtgtcagaaagcacaccaacagggcagccgtcttagaggtaaggatggctttaggaggctgaatctggcaacactccagtttcagcaaacttgaacttcctcaagaaattagcagaaatactggtttattccaacttgtattttttttctctctttattggttgcatttttatttctcctgccacataaagtagaaagctacttctttttctgatatgcttatacatcatcaagtgtgaagcattaatgtgtaaaactgggaccaagaagaaaatactgcatgatgacgggtatttattttacaatgagtaatgaatctcaacacaaaaacaatagccatagacattcgatttctctttcttttgttgtacatatttgctccactgacaaggaacctgaatggtgggacagatactctttttacacttgaatgaatacgaatagaacacaatgagttagagatgtgtttctttagaggtacaggtaatgggagcgagaggcaatggtaacaggaatggatgtgacctgcatatagggtgatccatcagtcactctgcccttcccccacccctcattctcttctggtgcctgttttctgtatccctttctgctgtgattgtagattggtactcaaacccacatttacttctacatggcttattgaattctacatgactttatgattgaaaatataatggcagattttggatatatgtcccccaaatctttttaataatatttttattaggtattttcctcatttacatttccaatgctatcccaaagtccccccataccctcccccctccactctctgcccccccactcccactttttggccctggcattcccctgtactggggcatataaagtttgcatgtccaatgggcctctctttccagtgatggccgactaggccatcttttgatacatatgcagctagagtcaagagctctggggtactggttagttcataatgttgttccacctatagggttgcagatccctttagctcctagggtactttctctagctcctccattgggggccctgtgttccatcctatagacgactgtgagcatccacttatgtgtttgctaggccccggcatagtctcacaagagagagctatatctgggtcctttcagcaaacaaaatcttgctagtgtgtgcaatggtgtcagcgtttggaagctgattatgcgatggatccccggatatggcagtctctagatggtccatcctttcatcacagctccaaactttgtctctgtaactctttccatgggtgttttgttcccaattctaagaatgtccccccaaatcttatcaggggatttaaaagcaggtgtcttagttttagttgctataacttgaagtaacatagacaagaaaacttacaaacagtactaatgcatccctcatgattctggaagattctggaggtttgaagactgagattgggaagggacaagggttccattgtgatgagggctctctcctgggttgcagactaacttccccttgtgttctcagatagcagaaagtgctatagaaatactatctttagaacacagtttctaccctttgacctaatgacttcccaaagctccacctcctgaaaccatcatatttggggatgctatgtcaacatttggatttgggggacagaggcacaaacattcaactcatgtcagagtctgtgtgcagtcactaaagagaatgttctcttgtaggaatgggattcggccgtagagaagctgaaaagccaggctttggggattctattgtccaaggacttggcaggaaaggaacatctacagctctctaaccagaaactgaatcggcttcaagaagaatttggaagactcatggtggaaaggaaagcctggttatcgatggcaaatgacttttttaccagtgctaacaaggtcagtgtaaggccaagttgacaattgtagggactcagtctaaccaataagagacctattatgttagctggccatggcatgtcatcaacggctaactttctggaaaagctaacaaactgagggaagcacttcaaaactaagagattgtgttttgatatataacaagtaaaattttaaaataactccaaagccaggtgtcttgaaccctaggactcaggaagctgtgggtttgaggtccagctggtctgcttattccatggcagttttacagtgagacctgtcatatatatataagacataagcaataacaacaaaatgacttttaaaaggtttcattttagagctacgattgtctgtttgtgatcaacactcttctctactttaaaatgtttctcacagacatgagggaatatcataaaatatatccagttaaaaagaaaccttagcaatgttgccaatatgcccttttgttgtttgttttaaagagtagttcaggctagcctccaactcccaatgatctgacctttctgggtccaccttccgagtgctggaactgcaggcatgcattaccacaccttgtttctataacactggaaatttgtgcatgttcacccagcactctaccaactgaggtacatccctgatccacgttaaaacacttttctttcatttattaggtagaaatacatgcatattatgtctttgaacataattttcatatgaagccagccctaaggtcagaacttgcttcacatcagacattttgccttggtcttacatttttaagtaaggcaagagggagtcctgacacggaccatcagtgggtctccttgactggctacctgccttcactgttggagcgggtgctcctggggtggtgatgtttgtgatttgtcagtcagaagttcttaggtcagagagtggagtctttgtgataggatttctacctcgccttctgcccactacatgagagcaccagaggttagtctgcagccaaggacatggccttcatcacagtagaaccccctttcttcctgatttcagctttccagccttcagagtcatgagcaatacgtcgctgttgtttatgtgcacaggtggtgttcagtgtgtgtggctggtgatgttatttgaagggctttggacctttgacactgtcacatagacctccagatgctgcattgaaattgcttgaccagtgacatattagcaatttaaaggtagacaggataaaaagcagaggatggggggggggaagctcctggaggcttacattattgctctggaatccttggagaatctgggtagtaaaattctaagacagagaggatggagttacagtagacctcttaaagaaggactccttggctaattgaacttttgggggattttactgttttcacgcaagaaacagatacagcgcagagctggagatattgaactaagtacatgttaattactcgttatttttctctttagcagcccaatttttaggtaagaggttttaaaatctccaccacacctttaatctacagaatgagttagctgtttcaggtcaactcttactggccgctaagggaaagcagaacagagtatgtttgaataaaacaatgcttctaatagaagcttcatagctcccagccttgcaaacacagatgtttcccctccttttctcactctcttgttctctcattgtcttggcttctctacagtcattatttggtaccttatcatggctgtttatcatctgactttattctcaggccccgtgggaacttgtaaaagtttgagcagctgggttgatggaggagaggaggaggaagccaagaaggagaaaggggaggacaagtcaagagcagatactttccgaatctcatacaaaatgccagtctggtctggaaaacaaaatgctcacaacctgaaagagtatatttctatgttccctgtgtcatctcatcatttgttcaactgataaagtcgactgacattgaccagtcctctagtttgtggtcagaaggaactcagaaaggcttaaaggtctttcttatgtaaggaaataatatccaaactaaaaactagtaactcagtgtgaagggtgatggatctgggaactggggtgtggctaatggcagtgtttgtagaatgcatggttaattatgcatccacatgaatgttctatgctattaagggaaaagaagtaatgaaactgtaaagtgtaagtctctgtaagctaagaactaaactcctcttatgacttttaagtgatatttttcctcctgattcatattttagattctccttgcctatatatatatatatatatatatatatatgcaggaaactcatcaataaatctcttgagggctggttttaaaaaattatattatcaaaagtctttaaaataattttctaggctagactttctgtatgtactagcaagaagggtagtgcttaatttacatcatcagttgtttatctcagaagtgctatgtttttccctttgaaaattgcctgtgacatgtctggaggatgctgggcttccttgctgtgtggacttctgtttgtaggtgaggccatgctcccaagcactgaggacttggtttctccgactttcaggctctgaggctgtccttccagggaggctggcagcagatgcataggttacgggtcagcattgactgatgacccagcagcaacaaactagctgggtgacaccatgcaaatgagctctgtgtgtccagttccaatatggctgatgtccacagaggaaggggtgaggagaggaactctccactcagggaatctgctggtctatagcaagcagtaagcaagcctgctttttgtctcagtgggtgatataacctctgattgggaaggctgctagctgcagagcctacactgagaaaggtgacatgctagagaggtcaggtcctttattcttggcatacaagacagaggggcaagagagcacacaggcaagcgtgcctgttagtgctgtgagggacaaagaagcctctgcctgagagctctttccccacagagatgtgaattagaatctcagtaaacaaactcattggctgaaattattcatgttatgtcaaatgccactaaacagaacatgctggggcggtgagcaaatgagccactgggatgtgtgaatgccagcttactaaagagtgagatagcggctttaaaatgtcctctgtgaggactgaagggtaagagcacctgctgcaccaatgcaaggagtccagatcccagggttttcctaagaagccgtgcatagtcctgtgcatgcctggagcttcagcattatggaaggcagagatagcaggataatgggagcttggtggctgactgtttggctctgagtaccttgagagaccttttcttggggaatggggcagagagggacagagtgggaagtctgacaacattctctgacctctacacatccatcttcacatgtgtgcctgtacaccaccagcattactacccctacccctcactcccaacacaccaccatcaccacacccacacatcactgcaccccacacccttcacacatcaccatgacaactatgaccaccaccttaccaccatcacacacacacacacacacacacacacacacacacaccacaccaccactaccatcacatacacaaacaccacaccaccaccaacatcacacacatacatgtacacacacatacacacacacacacacacacacacacaccaccaccactaccaccaccaccatcacatgcacatacatacaaacacacacacgtaccactaccaccaccactgtcacacatacatacacacactccaccaccaccacaccaccaccaaagtcactgaataagcagtgtagtaaatccacagcaacaattcctccatctttaaacatttctgtatttagtgaatatttattgaacaacttctctgtgacaggctctgttcctaatcctgaggataatatgcagaaagtctattggtcagtatatttccaaattttgagatccagtaagctgtaatgatcccttaactgtccacactgagaacaaattccccaatgcctttgtctcatgacttcagtaacccagctgataccttgtaatttgcttaggagtttgggacagttactcagaattagtgagtctgtttctcaagcagagaaaatgtgagcattgtattgctctggagagctggctgtttgaatctggacttagcagcaggtggcaatattgagacatgggccttgagaatgttgctatgtttgtcctagaccagactctaaaacccacacagagattgaactgggctacttaaggaattgatatacctccttttcagagtttcctactgtatttggtgaacccatttgttgaatcattcagcaacaaattaactagtattgttgatggtaccaccaccatcaccgtgagtatgagctgactggagaagagtccgtctctctgaattgtatcttcatagcttgaaatgtgagcatcatatctgttacagaacattccttgatccctccaagttttcatccttctcagttgtggcttatcatgtgtgctatatttccagcattttcgtggacttgtattaatatctgtagaccatccaagacacagttacaactgtttggggtttgtgactgactggagcaaggatgaatatctagcgtctttcaagatcagaacagcatgcactttttatttatgcaacagtcatgactgaacccagatctgtcaagcgtggcccttgggttatcaagtttcttgcccataccttctgttcccaggcacgtgatttctctgagggaagcaagtagaaaagatgaggccaagtctatatcatgaacatggtctgatcttcagatggtcagtatgaatgcaaaggtgaagtgaattttggggcattcaaagaaacccctaagtattcataggaaatgaagtgacatggcttccatcgcttccccatcccgactgcaaatgtggtgtctcagacagtgtggttgcttttcaaaacaattacaagacagtagtgcctgaagccacatttctgtttgacataaaagcaaaataattaagcatgacatttgctgtactttttccatttacatattcctcatttaccacttaaaatacatgcattttaagcacattggtagaaaacaattacaatgctctaattattgaacagattcaaagaggaaacatgcccagatagagaacctaaaaaatattattgagaaagaatttcttaaaatgatgtaaataaaaatctggaaattatactaattgttagagattttttttaaaagttagatttagctgtttaattcttgagcactgtgtctcagagtcctctttttaaaagatttaagtaagtgtatgtacgtgtgtgtgtgtgtgtgtgtgtgtgtgtgtgtatgtatgtgtgtgtgtgcacatgagtgtaggtgccagaaagggggatgatatcccctggagctggagttgtaagcagttgtaagctgccggacatgcatccttgggaaccaaagtccagtcctctggaaaggcaacacaggcccttaaccaccaatccatctttccagccccgcggattcctattttaaaaagccacttcttttctcttataaataactagaacagttgctttcccatctagcttcttacatcctgaatagtatatggtattcctgctgattctcagtgtcagatcggtacttgagtgaagccagtgacaggcatggtctcagccttctggtccctcatggggaatttataagacagaatggtgaacagtaggaaagccatgatgggttaagcccaatgcagtggggagcaccgaccagaaccttgtcaggaaaaatgtatcaaggaagataaccactgagtggagctaggaaggatgacacacaaggaagggggaaaaatgctggaagatgcaaaaccagccatacttgggaggtgtaggctaagtcattgcctaaggtgtggagggatacaactcagatcagatgtgaagagtgtcagaaacaatagagagagccagagttcattgaggtgtgtgtgtgctcacaatgtatagtagtgtacatacaatgcataatactgttattatatatcatctactatagaatatataagaaaatatttaagaacttgaaaaggttatcttaagtcgaatctcacccaaataattgatgatgatatcttcatttactctacctgccttctgtccctccgagagaataatgaatatgggttagaacctttgactttaaagctcagaggccaggttgttccaaccttagcatatggtcaatgaaggtgggcaaactgttcgtacagaagtattaaataaatacctgattgaaaagtatggaaagtctttaacatcattcatcacaagatcgctaaacccggttcaggtgtaatcatctgattgtcaagatattcaatttggggtcctacgactcaatagtagtgtgtttgcctggtgtctgtgaggtcctggattctacctccagtgctgcaaatacaaatagagatattccttttcctcctacttaccagtaagcattttttccagtaattttccagtaattaatagtaagtaaatctgtcagtggacctttaagtcatgaatatgtccactggatgtccttccatgtgttcttccacatgactatagatatcttttggcggtgaacatattcagccttgtggcagtcatttctcagtagatttatttttctttgcccaattaaaattccttgaggctaagaagcatgtctatctcactgtgtatttacccaaacagtctggtgccttctaattaattattcgagccactgaaagcacgaaatacaaactgtagagtggctgatctgctggagactaggtttctgagcatgagagctcttaacttcttcagagctgctgtggctacttgtaagacaccgtcaagacaagacctgctggctgttgatattttctcataatagaggaaacaaatgtcattggcccctcacctggagttccagtcattgcttctggtacttagataatataatttgcccctacatgcacatagtctcatcatctcaggaggagctagagaatatagtgtgtgcagcaagttaattgaagggaagagtccatctcttaagctatgggaaggttgccatctatgctgtggtaagactctccattgaggtggcagatttgtggtcacccatgctcctatatgtaactcctagtccatgttctgtaaataagcccaacaaactcattggtttcccaggttggaccttgagtgaatctacttcagtctgtcatatacagtataagtagacattcgttcccatctccctaagaaaagttcatacaacaaagaacactaaactctattgttcataacagattatatatatatattgactatattatacttgggataagatcaatttaaaagggaaaaaatcttatttactacgatgtccaaagaacacagattctcagtgcaacttctgtgtcattcctgagtggctaagtcgagttatatgaaagaaattatcacatgcatcacccttccaaacactccaggcactattgactttatttcttattattcctggcatactgatcactgttcaggagagaggttgtcttaatcatctttgtatgccacctagtgttcaaaatttttaagttgtatgactgaataaacagctggttatatggcatattgatttaggttttgaacttgagtctcctcttcaaatataagtcaaacaatctctgtctactttagagaatatcattctatattttttagagttggtgatgaattttataagcttttaagggtatagttggagtataaaatagaaatgatagaatattaaggaaaaatttagaaatatttattagcatgactgctaagataacatggtggatcctggagccaggctgggcatggatttggcaggacacatttactaactacatggcttcgatacgtacttacctcctccctgaactgggcatcttcttcatttataaaacagaaatccgaattctgtgttcttacaggattgccagcccatttcagtaaagtgatacagggttagtgcatagaacagctgagtgagtgcagagctaagtgcttgctgagtgagtgcagagctgagtgcttgctgagtgagtacacagctgagtgcttgcacagctgagtgcttgctgagtgctagccacagctctaccattccatatgcacttcacattgcttcagccactctaatgtgatgaatcttatatgcagcacatagttgaatctatggtccatagatattgctggatattccttgaagggataaaaacagaaatgattcatacatgatttcccatattaatagaacaaagatcatcctaaaatcacttaagtcgattaagattaaagaaaaacatagtgaatagatccgagatacctaaagttctacttaatgagtctcatttcatttgtaagatgaatttgcctcaggaagactaagatgctaatatgtaaatttccttcattttcctatggataaaatgctgttgatacatgcattcaatttaaagcttcttttccagtatttttcagcttgtggggaaaacctgccgagcaacaactacctttaaatacggcttaatagaacgactcatccaccccgagactgcaggggtaggagtggggcaacagagcaacactgagaagtaaggagcccgtgggggcagtggagagttgggaaggaggacctgaaatccaccttcctccagctcccgctcttcatgggtttgcaagccggaacaattgtggccatgtcctgatcatgagttagttcagcagcctgagccaccagcaggtatctgaggtgctgcttagggaagaaaagtgaagccatgggtccttatataagccacccagaggagctgtgactccccaaaggcagtggaatcagaggctctggtctgaagctgttttgtgtccttggatgttttccgggatgcgccattttgttgttgcctaatatttgactctttctacatttattagtcaaaaatctaaggctgttatttatcagcatcttttgtgaaccagtgtggcagcagaattacgttggatggcttatggttcttaaatcatgaatcttctagatatttaaaaagaataaaccatgccattctgcgataccatctatgtttgattcgctgcagttgacctcgggtctacatttcacagtgaacaggaaaggtttttttttttattggcctctttaagaacaaaagccaagcagttccttaatcttttccaaattagggcccaaaggatctgacctgccttctcgtgtggagggattgagggctagcatgtgaaatggttcagatgactaggacccaggaggagagaatgctgtcctggtgcttttctctccaccccacccccagtctactcataaatgcttattcaccctggacatataaggctttgaagaaacagggggctatgaaaagaaaggccaaggaggaggagactttaattccaagagaggttgtatgaggctcacagtgttcttattgccaggaagaccttctgtactgtatttgcaacaaagagtccagtatatcaagatccctacaggtcgggtacataggagagcagtccgttctattttgggaggagtgaaatgggaaggacgatgcttggatcatttctggaattggcacatggattcctcaccaaattctacacgggaaggagggaaagcaattttgcatatcattcagtcagtcagagagtttttttaattttgaaagaagaattctttttaaagcccaaagggttagctgttatttttatgtctacaaaactatccctattatgcttaaaacttaagtatgctggttagttgtcagcttgacacagactagagtcatctgggaagagggaaccttggtggaagaattatctccaccaaactggcctacaggcatgtctttgaaacatttcctttgattaatggttgttgtcggaggatcaaggtgacctcgggcagtaccatccctgggcaggcgatcctaggttgctcaacaaggaaagccagtagcagtgttcctccttggtctctgcttcagttcctgcctggagctcctgctttggcttcgctcaatgatggactttaatctctaagatgttataaactctttcctccagaggttgcttttggtcttgttttattgcaacaacaaaaatccaactagaacattaaataaggaactcctgttagaatccctctcgcctcactcaaaggtgttctgtgcatgtttgtgttaagctagtgaaaagaaacctgtcatctcctttaacttgccatagttttattatttgctttattatgtagagaaaatcgtgaagtgtgttcctaacaattgatctatttgagaagagactgtgcaaaaaaatctggctcatttgattccaagctaatgagttacctttgcttttgatttatggctcttttttcctagtgcatatctgaccctttagtttatcctcattcatttcagaagtcatacctttattatagatagcatcatgactaagagacagtggcattgcacatgcatccagcagccttgcagttttagcttctaactcctatgaagacgataccatggtcaaggtctgagaggcagcggctgggacagggtcacagagagagccccataggatgaaattcaagtaacaggtggctgcacccagctaggagattcttttaaagacttgtttgattgatccaaatgtagaacagcaactaacagtgtctgagtactgctcatttgccctcattcttagttactttcattgtttttctttaagtttcaaaacaacagtgagtgtagcatggcttattattaaaacagaatggggttagctttgtgaccaagaagagataccatgagttcttcatccctcctccatttgtagatacttggactttttttttttttttaaggaagaaaggagactacatcctgacatttacatgtagactttccatctatctcctcccttggtggagcttgagatttgtcaatccaaagtgcaaatataacatgtaacaattcaccaatcttaaactttaagtggtatttaagggaatccaaggtaattttagccaccagaagtttgctttagtcattgactttaaaccttacccttgattaacaagaagcaccattttatcctaaataaacaaccccaaatttaaaataaaattgataccctagaaacagagcttgctcctcagtgatgcttcagcaagctatgggaggatccagaaaatcataaaaaccacattcgctaacatcagcataccgctgtactttgctctgcttccagttgcaagagaaacatgatcaagtaagaaaggattcttgggtatcaaagtctctttaaaaggcttaagtgactacgagagcaaacctgaaagatgtgaggacattggaggaagaagagaatctcaacataaaagaatatctgagagatttctgtagattccaattcttttctgtttgaattttggcggtgcacttggggcacatgttctatcctcaattccaaggctgacatcttcaaagtgcctcgtatgagaatgaactcagccccactttgctgcctccctggggcctccactagcccacccgttcttgtctcggatggtctggaatcctccctgacagtcttctgtggggtatccctactccattctaatgggcccctgccaaattcccacttagcaatctggaaaggctggacttcaaggcgcttgctggactacctggtgttacacggtactatccaacttttatgatagaagtggtcttcagaggggcatagaacattcggcagggaggctccactagcgctgaccagaagaaggcttctcttgatgttcaacctttccttcactcactttactcttcccctctccaggccagaggtcagaaatggctatcaggagacctacaaagactgaactctgctttatctttttaaaatgtcttttaaaattagtccttattattcttatgtgttttataactttttatttttattacttctaggttgtttgcagtgtgtgtgtgtggggggggggtacataaacacaaatacagatgtctgtagtttccagaagaagacacgaatttccctagagctgaagttgcagaaggttgtctgcctcccaatgtgggatctaggaacaaaggtcaggtgttctgtgagaacagcatgcctgcttaactgccgagacatccctctagcccagtgcttctgtatcttcttgctatctaagcctcgctagccaataaacagctcctttgtatgtcatgttaattttgtaaactccatcgtctatgttgggcagttggtcagtctgtctgccaatgcagaaaacaatggagtttaaaactcttattttaagacaatatcttgatggaggtggttggggagatgacttgatgtagagaacatcatttcacagccagagaagtacgacagtgggcccacgatcatggaattcactggtcttaccacgttccccatcatcctgaagcagctggtctgatagaaagatggaatggccttttgaagacgcagttacagcgccaattaggtggtaacagcttggaaggctggggcagagttcttcagaaggcagtatatgctttgaatcagcgctcgatatatggtacagtttcacccatagccaggattcatgggtccaggaatcaaggggtggaaaatggaatagttccacttactatcactcctagtgatcctctaggaaaatttttgcttcctgtccccataactctaggttctgctggcttagaagttttggctccagagaggggagtgctcctaccaggagctacaacaaacattccattgaactggaagctcagacttccccctggtcattttgggcttcttatgcccttaaaccaacaggctaaaaaaggaataacagtgttaggaggggtgatagatccagattaccatggagaaattggattacctcttcacaatggtggtaagcaagattatgtctggagtgtaggagaccccttagggcgtctcttagtactaccttagaactattctctcagaggactggaattcagttcccaacaccaacatgctacttcacaaacatctggttcaaggtgaccccacgacctcttgtagtctccataggtgccaggcatgtacctgatacacagatatgcatggaggcaaaatatgtgtacacataaagaaaagagtgtaagacaatggaggtcttggtttgaaagggctacatttttttctatatatctgatattgagtacatcagaaactattactttgctcctgctctttgtgctatgctataactgtattgtaatcccctcctgtgggcatacagatgccttggatcgaatagatcaagttcatattttaaaggcaaagggggaaaggatagtaatactttctcagtgtctctctctagggattcaggttcaaagcatagctcatcaggaagttcccctttaagacttactacagagatattcaggtcatgaaaggctactaagtttttaataactcatccactgtatgtgtacagtataaaatatgcaaagtaccaattcgactctccaaatgtcataccattttagctatctgtgttatacagatatcgcctcaatataagtgattctggtaactttatgacgttgacatttatgatggactaagttataagtttccctaagtgggaactgcactgctgttttccagatctaagacttttgttgttgttgttgctatgatcaaactactaagttgaatggcctggtttaatcgctagtgtttcatgtacacattgatgtagttttaaactaaaaaagcagaaaatgaaagtttttttttttttggcagtcatttgatgtacttgggaaagttgaagcttaccttaagctccttaaatcagagggtttaagcctgcctgtcttggcagcgaagcatgaggaattacacagagaaattaaagactctacagccactgctctgcaaaagggacgaaccttaatcagccaagtagactcctgccggtgagtaaagtctgttttatccccagtgtagcaagctttttcacagtttccacaaactgataccaaaaaaaaaaaaaaaaaagttgcgcgaaggcttttatttatttatttttctgcttctgatgtttggcagcattatgatgtgacttaaaaggttctattgaattatgttcaacagtgattctggacacagcattgctcacccaagcctgaggacttaaagacgctaaagctttgtctctgcgtgtgtctgaagagggggagagaaacactaaacagggcggggctctgtttctaagcttcccacatgctggcacctcctcccatccccatccccacaaccccgcccagttcatgagccttctctgttgctccatttctcctttctaggaacaaaacaaacaaacaaacaaacaaacaaccttccagaattgtcatttccttttgaccttgctatttcaccgagcaaaaccccacataaaaggtaactattaataacaaaagctcccgttgagtgagagcctgctatgtgccaggcatcatgccaaggggctttagggacatcatctcatttaatccacagagtgaccctacgaaacactaagagtgttttccttccacagacaaggtcactgtggtacagggttttaagtaactcacacacaggaccacacagccagtttgtggcagaggcagcatcagaatccaaggcacaggctccagtttccatgctcctgggcactctgccaggaggagcacttcagtgagcatgctcagtgcgtgcctgagggtgagctgagaactgactgctcctgagggcagaaaggggcatcggaaaagagaaagaacgcacttggaaagtgtggggatttgaagacaggaaggtggcatagttcttggagcaggtatcaggcaggaaggaatgaaggcagcacttccctttgaacatgaagagatgaaatagatttgtccagagaggtgagaccccagctctccttttccctagctgccatatccttgaaactccagaacacaatttgaggaatgaagcaggtagggtgtggtaaaacatggtttcgtttccctttagcttcctggtctgttcttccagatagcaaacgtggaagcctaggcatgggaattttctttccagaaaacagtctgacctggacagaggcattggatttggggattaagtggttgctatgggaacgtgcaaaactgagattagagttaatccgaggtctcccagcaagagccaaaaactggaagccatgacaagggcaaaccatttttccacaggggcataactaccaaagacaactgtaggtgcttgtcttgggtcaggggttgggccagatccaggtaaggctactttccattagactagagcccagacacgcagcatctgggcccaagtgtgcctgcagccactgcttgctttatttccccttgtgatccatgtctagtccttgtaaatgtcttgagtcatgcagaagactgtaagatacaagaggcactggtatgtttgtgtggtcatatgatgactagagtaagggctgaaacctgccattatcattgggtctcacagtctgggccagtattactttcttggtcaggctactattttggttgtgctattctttctggctttgggaagattcctcaggtgtgaacaactgaaaatgcagccaaagatccccctctcctgacctctggagttctgctttgggttatcccttcctgcctggtattccattccaccagtcctaggtgttgagcttctccaaagactgatcttgacttctttttaattaattaattaattcattcattcattcattcattcattcattcactttacatcgaaatagcagcccctgctcctcccagtctcccccctctcaaagctccccacattttcccctccctttctcctctgagaaggaggataccccctccccccccccgcaccccagtatatctgtccaaccccacagcacattgagcctttacaggcaggcaacaaattcagggacagcccctgctccagttgttgcaggacccacatgaagactgagctgtacagcggctacatatgtgtgcttgtgtcgggcttgtggggatgggctaggtctgatccatgcctgctctttggttgatggttaattcagcaagagctctgggctcttggatctcacttctctgagctcggatctagaaacttcccacagtcgggaagctggcaccagccctgtgcttggggttttgcttcccttctctgggtcacacatttgtcttttcccaggcacttgagagccggtggcaagtttaactcccgcttcttactcagacactgagttttctggttcaggttgatgcttcattcctagagtcagaaaggttttcactggtaaactttatatctggtttgctctggtctgaaacactttaattttgatacctaatttctttattgatgtgcttttacttcatctccctcctccccctcttcttctccctcctccccttttgtttttagtatggcttgcaatttttttttactcatccacttcaatttttctgtctccctcgttcttcctagtcttgatttttatatttcccccattttccaaagaggaatctattgtttttctcttttcagaaaataatttgggtctaatagaaaaacctggtaattagaaccattgaaagaaaattaaattaacagcaatctggcttgattttaaagagaactagagtatgtttctgtcagcatctcagacgtataagcttgcttcataacagtaccaagatcctgtcttaccctgagaagtggcaacttttggatcagtgtcaccttcatttcgaaggagggactgaaggtaaaaagaaattgtctttcggcaaagcactgtttggactcagaaagtggatgcaaaataggagcccattagaaaccaaatctcggttgcaaaccagaggacagcatggctattgacgtcagttccatacattccacctgggacttccatccccttctccatctgattcatctccacacacctgggttcccagaaaaggaaagaagttttccaagaaggaatttaccagccacagccactctggagtgaaggtagagtttagagtcatagcaaggacaacagacagacatttgaacatgcaaaatgtctacatgaaccagccatacagccataccaggtcacaaagtgctgttagcagatgcttccaaaatggcatggatcaggatcctaagccttctcaaagcccacttcaaggagttgggctgtgtgcattgggagtgcccggataatggtgtggcttttaaagttaactctttgagtccctttcctcctctgtaaaatggaagttcccatctagtatttttcattgaataacacaacaccattccttgcacatagaaaacacccaatatgtaattactttagtttaaaaaatctgtacaaagggatttcagagcaaaatactaagagccacatggccattccaaataactgcagcagggtgactacaatagtgacatgcacttaaattagacaggaaggttggtgttgagtttcagatggtaagtatttcttgtcaggtatcaaaggcagaatttagaattggaatatcagcaggtagaaatttcagagtccctgttatttaactttttactgtttatgatagaaaacaaacaaacaaaccaaccaacaaaaccctcagaagttttacatttggatgaaatgaggaaatgactgctccaaggtaaggctggggaggtttctgttgtagatttgagggagagggagactacagccacaggcatccagaagagtgcacagcagggagaaaaagcagtagactaaacaggatcagtaaattgaaccaggcatgagaggagagagagagagagagagagagagagagagagagagagagagagagagagagagagagagagaggaagaaggaggaggaggaggaggaggaggaggaggagagaagagaagagaagagaagagaagagaagagaagagaagagaagagaagagaagagaagagaagagaagagaagagaagagaagagaagagaagagaagagaagagggaaccaagaagatggagaggagagaggagcaagagagcacatgggtgaaatgataggcttctataggaccagacgctggggaagggagggccatgaggcacagatgtttagggtagagagcagggtgagaagaagtgggaggagccaaatgtactgagtgtgccctgaggccagcaggcacactggtatcccaataggcacccagttagccatttcttctgagcttcacttgaacctgtcaatatttatctgagatatcttggatacatctgagctgtatttcattgctgctctgtaaagaatcccatcctagggacagactcactgatttcgtatcctggaatcgaatgtgtttgaaccaagcagcctcacaggatgcacagtggtaatgcccatatttgtctgattctgctaaatctaacctgcattctaatgataattctggatcattgagtgtttttttttaatctttttagatggaaacatctgtcatatggctaagcgacactgcattatgattttttgtgtgtgttgctttgcatgcagctatgacacaagttatttataatagaatatgataacagccgagcttagattcacagcaaggctgagagccctcggcttctggtcccccttacctactcctaagctatgattggcatcattcttaaggaaaggtggcctgctagcacacagtgtttgaaattacaccacaggaagctggggtagttggaagtgctcggtctgaagcttaggtgacagcgatggctcggagcaagggatctctgtctctttctctaagtgcagctcccgcttcagagcttaaaatataaaacacacagcagggccaggctacctcatgaactattcatttgcctttcttgtctgttaacatccacttaggagttatatgcgagcatctattagctcagtttctatccctgcatgaaagatggtatcacgtttcactctctcttatcatggtgaagttaaatgtgttagtaacaccttagctggatattttgcttctgtataataactttaagtgtcatctgccttgatccaatgcatgtgacttttttcatataagtttttttaaaaatttctactttctagagttggaagaaaactgagttaattaagattatgcttctccccaccccaccccctcagtttttatttatattggctaccgacaccttcgttgttactacaggtgataacaaaccttgggcagaatttagctcattcattcatttcttcattccaatgccacgttcaatgttttgtaaagcaggtgttcccaagcatctaataccacttgtcctcatattgtttgcattctggtgggaagagccaaccagcaagtcaatctgtaagtgagataagcaactgtatggcagggactgtttcaggctctggggtcaaggaaggactggccgagaccagcacccgtgcaaatccctgagaggtaggtggacctgataaagagcagcagcgttgcatcagaaaggacagtgccactgaaggagaagtagacaggaggaggggagagtatagaacatggcaagagttgagggaactatgttgacaagcccattagccaccacagaaaaccctatcctttatgtagcacttgatggatttaacgatcacattccagcatgtacctgatccatcattgtccctgttttgcagaatagaatttggggtacagagaggtctgacaacttgctgcgccatgtgtcccatagcagcaaaggactgggttgcttgtctgaatcattccactagattgctaactattggtctctctcctcttgtcattcagcttccattggtcacaaggagcctggttgcttcatcgccatggattctctttcattctagcatgctcatggagaatttcatctctgtctagctttaactggggctccattttttctgtacttttctttggtttgttttaaatgcagaaaatggctgtgacctcaaggctagacaaagatacataaacgtgtctcagaattataaggacctactggcatccagtcaagaaggtacacactgcatacgtgtgctctagaaaacaggacccatgtggtcagaggctgtggtgcctagttatggcttcagaagggagccataactctgaattgagaacatagtaggcagagtgacgttagtagaatggagggaactgcagggaagagaatgcaccttcagcagagaagacagaagaccagctactacataatactttgtatccctccccgcttctcacagccatcccttttgttcccttctgactctgctactctggatcatcccttagtcctttctgttgtcctgtatcaccttcatcacaagaagatattgtctagagagttaaaggaaaaatgctcatcttcctttctggatacttttatcagaggtaacttgaactattcaggagcaggcatgacatcagagaaaagccacaccatagtgaaatgtattgttttaaccttaaatggaaaacaaaggcaatgcaagccctccacaggggggggggagcaacattttctcttgcctagcagatttgtttgtgattgcatgcatttccttccccccctcccaccccctccacacacaaaagctaactttaatggagtctgatgatatatttaggtggtgagtgtcagatactgaaatttgggaaattacaaagttgagttcttaggagagtttgaacttagctgctgttcagatatctttgtgtctataataagcagttgagtaaacggcagcattgccatctcaacctgctaccacttaacaaacaccgttaaggctgatggctgctttttttctgtttgtcctaaagctcctagtatagaatgtatcaaagcttagactacattaaaagagtatctatcagtttatttttcacaaaatatctacaagttagtcattctaatgcaaatttactttgtgatgatgatgatggatgatggataatgttgatgacaatgatgatgtggtgaagttgcctgaatcctgttgtgggtaaatagctggggaagagcagagccagccgagggaggctaccttgaaaggtcagaaaccttgccctgcatgattgaggggttnnnnnnnnnnnnnnnnnnnnnnnnnnnnnnnnnnnnnnnnnnnnnnnnnnnnnnnnnnnnnnnnnnnnnnnnnnnnnnnnnnnnnnnnnnnnnnnnnnnnnnnnnnnnnnnnnnnnnnnnnnnnnnnnnnnnnnnnnnnnnnnnnnnnnnnnnnnnnnnnnnnnnnnnnnnnnnnnnnnnnnnnnnnnnnnnnnnnnnnnnnnnnnnnnnnnnnnnnnnnnnnnnnnnnnnnnnnnnnnnnnnnnnnnnnnnnnnnnnnnnnnnnnnnnnnnnnnnnnnnnnnnnnnnnnnnnnnnnnnnnnnnnnnnnnnnnnnnnnnnnnnnnnnnnnnnnnnnnnnnnnnnnnnnnnnnnnnnnnnnnnnnnnnnnnnnnnnnnnnnnnnnnnnnnnnnnnnnnnnnnnnnnnnnnnnnnnnnnnnnnnnnnnnnnnnnnnnnnnnnnnnnnnnnnnnnnnnnnnnnnnnnnnnnnnnnnnnnnnnnnnnnnnnnnnnnnnnnnnnnnnnnnnnnnnnnnnnnnnnnnnnnnnnnnnnnnnnnnnnnnnnnnnnnnnnnnnnnnnnnnnnnnnnnnnnnnnnnnnnnnnnnnnnnnnnnnnnnnnnnnnnnnnnnnnnnnnnnnnnnnnnnnnnnnnnnnnnnnnnnnnnnnnnnnnnnnnnnnnnnnnnnnnnnnnnnnnnnnnnnnnnnnnnnnnnnnnnnnnnnnnnnnnnnnnnnnnnnnnnnnnnnnnnnnnnnnnnnnnnnnnnnnnnnnnnnnnnnnnnnnnnnnnnnnnnnnnnnnnnnnnnnnnnnnnnnnnnnnnnnnnnnnnnnnnnnnnnnnnnnnnnnnnnnnnnnnnnnnnnnnnnnnnnnnnnnnnnnnnnnnnnnnnnnnnnnnnnnnnnnnnnnnnnnnnnnnnnnnnnnnnnnnnnnnnnnnnnnnnnnnnnnnnnnnnnnnnnnnnnnnnnnnnnnnnnnnnnnnnnnnnnnnnnnnnnnnnnnnnnnnnnnnnnnnnnnnnnnnnnnnnnnnnnnnnnnnnnnnnnnnnnnnnnnnnnnnnnnnnnnnnnnnnnnnnnnnnnnnnnnnnnnnnnnnnnnnnnnnnnnnnnnnnnnnnnnnnnnnnnnnnnnnnnnnnnnnnnnnnnnnnnnnnnnnnnnnnnnnnnnnnnnnnnnnnnnnnnnnnnnnnnnnnnnnnnnnnnnnnnnnnnnnnnnnnnnnnnnnnnnnnnnnnnnnnnnnnnnnnnnnnnnnnnnnnnnnnnnnnnnnnnnnnnnnnnnnnnnnnnnnnnnnnnnnnnnnnnnnnnnnnnnnnnnnnnnnnnnnnnnnnnnnnnnnnnnnnnnnnnnnnnnnnnnnnnnnnnnnnnnnnnnnnnnnnnnnnnnnnnnnnnnnnnnnnnnnnnnnnnnnnnnnnnnnnnnnnnnnnnnnnnnnnnnnnnnnnnnnnnnnnnnnnnnnnnnnnnnnnnnnnnnnnnnnnnnnnnnnnnnnnnnnnnnnnnnnnnnnnnnnnnnnnnnnnnnnnnnnnnnnnnnnnnnnnnnnnnnnnnnnnnnnnnnnnnnnnnnnnnnnnnnnnnnnnnnnnnnnnnnnnnnnnnnnnnnnnnnnnnnnnnnnnnnnnnnnnnnnnnnnnnnnnnnnnnnnnnnnnnnnnnnnnnnnnnnnnnnnnnnnnnnnnnnnnnnnnnnnnnnnnnnnnnnnnnnnnnnnnnnnnnnnnnnnnnnnnnnnnnnnnnnnnnnnnnnnnnnnnnnnnnnnnnnnnnnnnnnnnnnnnnnnnnnnnnnnnnnnnnnnnnnnnnnnnnnnnnnnnnnnnnnnnnnnnnnnnnnnnnnnnnnnnnnnnnnnnnnnnnnnnnnnnnnnnnnnnnnnnnnnnnnnnnnnnnnnnnnnnnnnnnnnnnnnnnnnnnnnnnnnnnnnnnnnnnnnnnnnnnnnnnnnnnnnnnnnnnnnnnnnnnnnnnnnnnnnnnnnnnnnnnnnnnnnnnnnnnnnnnnnnnnnnnnnnnnnnnnnnnnnnnnnnnnnnnnnnnnnnnnnnnnnnnnnnnnnnnnnnnnnnnnnnnnnnnnnnnnnnnnnnnnnnnnnnnnnnnnnnnnnnnnnnnnnnnnnnnnnnnnnnnnnnnnnnnnnnnnnnnnnnnnnnnnnnnnnnnnnnnnnnnnnnnnnnnnnnnnnnnnnnnnnnnnnnnnnnnnnnnnnnnnnnnnnnnnnnnnnnnnnnnnnnnnnnnnnnnnnnnnnnnnnnnnnnnnnnnnnnnnnnnnnnnnnnnnnnnnnnnnnnnnnnnnnnnnnnnnnnnnnnnnnnnnnnnnnnnnnnnnnnnnnnnnnnnnnnnnnnnnnnnnnnnnnnnnnnnnnnnnnnnnnnnnnnnnnnnnnnnnnnnnnnnnnnnnnnnnnnnnnnnnnnnnnnnnnnnnnnnnnnnnnnnnnnnnnnnnnnnnnnnnnnnnnnnnnnnnnnnnnnnnnnnnnnnnnnnnnnnnnnnnnnnnnnnnnnnnnnnnnnnnnnnnnnnnnnnnnnnnnnnnnnnnnnnnnnnnnnnnnnnnnnnnnnnnnnnnnnnnnnnnnnnnnnnnnnnnnnnnnnnnnnnnnnnnnnnnnnnnnnnnnnnnnnnnnnnnnnnnnnnnnnnnnnnnnnnnnnnnnnnnnnnnnnnnnnnnnnnnnnnnnnnnnnnnnnnnnnnnnnnnnnnnnnnnnnnnnnnnnnnnnnnnnnnnnnnnnnnnnnnnnnnnnnnnnnnnnnnnnnnnnnnnnnnnnnnnnnnnnnnnnnnnnnnnnnnnnnnnnnnnnnnnnnnnnnnnnnnnnnnnnnnnnnnnnnnnnnnnnnnnnnnnnnnnnnnnnnnnnnnnnnnnnnnnnnnnnnnnnnnnnnnnnnnnnnnnnnnnnnnnnnnnnnnnnnnnnnnnnnnnnnnnnnnnnnnnnnnnnnnnnnnnnnnnnnnnnnnnnnnnnnnnnnnnnnnnnnnnnnnnnnnnnnnnnnnnnnnnnnnnnnnnnnnnnnnnnnnnnnnnnnnnnnnnnnnnnnnnnnnnnnnnnnnnnnnnnnnnnnnnnnnnnnnnnnnnnnnnnnnnnnnnnnnnnnnnnnnnnnnnnnnnnnnnnnnnnnnnnnnnnnnnnnnnnnnnnnnnnnnnnnnnnnnnnnnnnnnnnnnnnnnnnnnnnnnnnnnnnnnnnnnnnnnnnnnnnnnnnnnnnnnnnnnnnnnnnnnnnnnnnnnnnnnnnnnnnnnnnnnnnnnnnnnnnnnnnnnnnnnnnnnnnnnnnnnnnnnnnnnnnnnnnnnnnnnnnnnnnnnnnnnnnnnnnnnnnnnnnnnnnnnnnnnnnnnnnnnnnnnnnnnnnnnnnnnnnnnnnnnnnnnnnnnnnnnnnnnnnnnnnnnnnnnnnnnnnnnnnnnnnnnnnnnnnnnnnnnnnnnnnnnnnnnnnnnnnnnnnnnnnnnnnnnnnnnnnnnnnnnnnnnnnnnnnnnnnnnnnnnnnnnnnnnnnnnnnnnnnnnnnnnnnnnnnnnnnnnnnnnnnnnnnnnnnnnnnnnnnnnnnnnnnnnnnnnnnnnnnnnnnnnnnnnnnnnnnnnnnnnnnnnnnnnnnnnnnnnnnnnnnnnnnnnnnnnnnnnnnnnnnnnnnnnnnnnnnnnnnnnnnnnnnnnnnnnnnnnnnnnnnnnnnnnnnnnnnnnnnnnnnnnnnnnnnnnnnnnnnnnnnnnnnnnnnnnnnnnnnnnnnnnnnaccccagcacctcaagtctctgtgaggctaggcccattctccctgaggccagacgaggcagcccagatagaagaacatatcccacaaacaggcaacagcttttgggatagcccccgctccagtttgggacccacatggaggccgagcagtacatctgctacatatgtgtggggaggcctaggtccagcctgtgtaggctcttggttcgtggttcagtcgccaagatcctccaagggtccaggttagttgactctgttgatcttcctatggcgttcctatccccttcccccaactcctccataagggtcaccaagctccattcaatgtttgcctgtgggtctctgcatctgtctgagtcggctgctgggtggaacctctcaaaagacagccatgctagattcctgtctgcaagcataagaatatcattaatagtatcagggattcttatgtaggttgtatgcaggtaaagacagctacatagagtttatgagtgcaacagctatgtcgggccctaaagacctgctttacagcacccctctccaccctctgcctcttaccttctctataccccatctatgtcctttgagccggacgggctggtgtcccaccaactctctccacagttgcttattctttgtactttgagcacttatgaatttttacatgaattactgcccactacaaaaggaagagtctctgagcagcactagtctatgggtttaaacatagtatgtaagtatttggaatgtagtttgacaccatgttctttaaacagttaggttctccctctagactctatgacctccccaatcagaaagtggttggttgctaacataatcattatgtcactattgtaccagtgtgcagatcttgacatttttattatgactactcaacacgtatttttctcactccttaagtttatgtgttcttttttttccgtaaatgttgatcagattctattttattgatctttaaaatgacattaattggtctagagatgtagttcaggtggtagagtgcttgcctagaaagtatactctccagcaccctataaaccatcagtggcagtgtgtgccggtaatcccagaactcaggagatagacagagaaggattaagagttcaaggtccccaggctacatggaaagattgaggtcaggctctgagagctgagactctgtctcgaactttttaagaaatgtattaaccttccgttattataagaccatgtgctcaaggctacaaggattataggagtaagtcgggcaccagtccttacccttaaagaatttatagcacaatagataaagtgcctgataagaaacaaataaatctcctaggtgattgaaaaacaaaatcagaaacaaacagatcctattttattggcattgatttgtcaaaattaaaattatggttttgcgaaggtgatatttttactgaagaaatgcttggttttgggttttgttttcttattttgtgttctctgtgctggaaggactttcaagacatgcaatttgaacaaggtattacatccctctagtggccattttccagactacatgcaggcatagcttttatctagagaaaacaaccaatttcaaaagagcttgccaaccaggccgatctatttgaatgcaagtcagcaacagtcaataaaagaacgccaggagaaaaatacttcactatgctttatgtcatgtgttccacactcagaaaaagtgcaagaagattgggggtagggtggagaattgactgtgagatcagatacccaggctaaaatcttgcttctgctattccgtgactgagcaagttagtgaaaggaaaaaaattaaaatggggtgaagagcaattgagaaagacagtgttgacctccagcctccacgtgtgtacacctgtacacaccttttaacacacacatacacacacatgcatacacacaaacatgcacacctatatgcatacaaacgcacatgtgcacacatgaacacacacaaccatgcacaaaaatgtacatacacacaagcatgcacatacacatgcacacacatatacatgcatacatataaacatgcacacacacatgcacacagatgcacatacatgcacacatgtacatacacatgcacacagacaaacagcacacacacacaaccatgcacacacacatggacacagatgtacatacacacacgcacatacacacatgtgaacgcacacaaagctggctgggaaccaaagagtagtgaactgctgtcccccagggagtagcccattcaaaattcatagttgttttccagtttccttcttggaggtgtcgattctaagtgtgatgagcaaacaaatgcctaactgtagtggatgcagggtgcatgctggtggtgggggtgactcagaagtagaaggtgatcatccttcatcttggctggcacagatgtttttacaattttatattacaagttttaccaataacttgcaaattgccatggtgtttcctgactcttaccaccgtcccttctcttgccatgtctaccagtccctgccgttaccttttcctctgtgcctttcccagcgtgctacacagatacattctctttctcattctaaatttcagtattctatagaaaacttggaacatagtactcataggacaacaggactttaaagacctttttagtacagcttctgtcagtaagaattggttctaaaagtctcctggtggttttttttttttaattattattttcttcactgaatataagtactgagctataaaactaattgttctaaatgtgcctggaatgttgtataccaggaacaatatctctcatagtggttttatgtcatgttttacaattattcttgtctgggacccttgatgtaccccaggcacatccaagtgtgactgtttggaagcatctttacaaccattctagggacattgctatacccctaggtctttttttgatcttgtcctcatttcattactaatttatttttactgactcataaattaattgtttgaggttaaattcttgaaatctgtacctagctccaagatctttataaaaaaaaaaaaaagaaagaaaaataactcccaggataattaaagagttatcatgctaacttttgctagtggttgaaggaaaatggaggggggaaattaaagacttagatttctaaaatagcaggcaaggtgctgtgttcagtccgcccacactctccttacacttcttgctttgtgaaatcttaggaatggttaggaaacctgtgaccatttctgcaatgggagcagttggagtccaactcaaagctggtttgaaagtcttgtccttttatgagcctccatgtcaccttcatctcataaggtcaacacaggttataaaaatgatgatgtgaagatgaaatactggcaagcatatttgatatctaattgctagtgataactaggtatttatctagtggatatagccttgagcattcataaccactgagaacaaaatatataaatattttaccctattgggttagcaaatgctttgttaattggccgattcacattcctattcaaagagcatcttgaaataaatgaagcttttaaatgatgcccccagggaaacttggtaaacatactgtgccttttaccataagattctggaagtatctctgagaaatattaaaaagtaaacctttagaaaagattagagctgctgcagaagccatcattcatcgttccctcgagactgacggaccttaaacaaaggaacactctgtggctttgccgcctgctgtgccagtgtgatagcttctattatctgaaaacagtagcttgcaccaactcagactgcccatgaaaggagagatctgttttcaggtggtgcctcttgtcagggcttctaagtcaaggtcaaggtgaactaaccactggcttgttccattcagctctcgggtgacaggaatccacgagatgatgggatacattcagaaccgagtggattgtctcactgaacagtgtacagcgcatgaggaatttgcccgcaagagacagcaattagcaacatcagtggacgactacctaaggaaggtagtttcataaaagaatatatatacaccttttatttggtgttcacggatggtgtgccaactgtgagcactgtgggagggtgtggcacatctccttagacttcctctatattacatagtaggacttataatggggtgaacagttgtaattcacctctgccccaggttgccaatcataaatgtctaatgttgtctgccattccagtgcatacacacacacacacacacacacacatatatttatatatatacacacacacacatatatacaaacatactctccatagttctgtgttagccacatcagacatgccccaaaaggggggagtgctggtttgtatgactctgagcaaagtcacatgctagctttcatcataatggcacaattgaccagaaggacttcagatagccagctagatattaacagttttgggggttgtgtttctgggaaagatctgttgtcatcatcattttgactggacagaaccagtgcaagagacacagtcatccacataaaagcactcacgggaggaagatcagcagctttctatggaaacattttgctatctatccgctgaagacacggtggtagtgagccttgctgtagacgctgggtctcaaatgttcagtcatctttgtattcgatgcaacctactgatatacttgagtatataggagcagagttaacagacttcataggatctggcactaaacagcatccttgttaggttgttccctctgttactgacccggtagctcatgactgtgagctgtatctggttgcctgggtccagagagagtttgatcacaggagcagcttgaccacttgagagtcaagctaattcggtgattgtggaagacacaccaggaatttaaacaatggctgcttcttatctgattgctgacttagctgtggagggtgtgcattctatagaaagcaagggatgaaggaaataactcgagtggaatgaagcccttccagggtcacctaggtcactggttcttgtgaaccaaagatcaaatcacaattccctcaattcatcagtgaaatgattcaagtaggtccctgctttcactatcgtctggacagggcatttcccagagctccccagctttaaatacaactgtctgtagggtagtctaacacctccgtttggaatgcttgcttacttgtgccagcaaattggtctcattcaacatacagatgaattcatctctgctaacatgttagcaagtatattatcatcctctgtgggcaatatagaaaagctcttcatgggtatgcagggatgatagcttgtagtcattgctgtcagtgaaagactatatttatagcttatcagtatggcatcatatgaagatcagcattatcaaaatatgaaattcttcaaaatttaaagctattttatacaaaaatgatatacatttaaaatacaatggtgatgtatggaacaatatttccttatatgtacactcctttatataagtatatatttttaagactacaatatattctctattccctaaggtggaaatgtcaattcaggaaatcaggcccattcttgctaccacattggatgttgcttccagcccttctgaatcagagaagattttaaataaatatctggaattggatatccaagtcaaggtaaatgaaagttatttctaggaccataatgttgaaaataattatttaaaaacaatttccaaagatatggcatttagttccagctcccttaagagctgcaattatagccgggcggtagtggaggatgcctttaataccagcacttgggaggcagaggcaagtggatttctgagtttgaggccaacctggtttacaaagtgagttccaggacagccagggctatatagggctaaccctgtctcgaaaaaccaaaaaaaaaaaaaaagagctgtaattataagttaatacagataatgacatgaaaatcacatacactgttatgtgtgtctaagttgtgtgtatttttttgtgtccatttattagcatatttattgcaactgtaggcaactgtagttttcagattcttagctggcattggttctctgcctgagaacagactcgtgttagcaacactttcgaggtgccagactaggcaggaaagcactcctctaagattgtgacttcttacaagaatttcacaataaaatcacacagaatttccagaaacaacatgcgtcatctgcaatctttaataaggcaaatctaaacttgcttcacctccatattcagacactgagtgcccgccccaagtgtggctctgccttggatttagagactcctgccaggccggagcttctcacacttcctaaggctgtggccccttaacacagttcttcatgtggtggtgacccccaaccataaaactgtaattttgctgttatgaatcataatgtaaattatatgcaagttatctgtttggtgaccccccaagggggttgcaccccacaggttgagaacctctgccctagaggttccaaatctacactgtctgcctgccctgtagaattttaaagtgagtgcctcccccgcaccccactcacctgcatcagcaagaaaaaccccatttctcctggtttccacagaagaccctcactcaaaacagccccctccctgtggataggcacactggtttttttttttttctttcctccttattagaataggatttagaaacatcttcatttaaaatgcctaagccttgtctgaaggcattctctgtttagaatttagaagcatgagagagaactcagggggagaaatcccttgctcctcgtttttctgcagtgtgttgtcacgaagcaggactggcaaattgcagctcagtgcagtcagtggggttcctggcaagcatgttaacacaatggggaagatgtcccttgtgctgcaagtgagagcacaaacattttaattctgcttcattcctcccttgttctcgggaagttttgcagggatttctttctgtggctcttagtcatgtatcactcagtgatgacgatgcactctgagaaccgggccgttgcacgatttggctggtgttgtgtgagcatcacagtgtgcacttaacacagacgtaggcagtcgccagacattgttccttgatgccgtagagaaatgtaaacaccgtgtatgaagctgctgccagctcaagcaggtctcctcccttaaagtacatttctcctatgtgtagaagaatcctccaacaataaaaatagtgatagcaaatatatgaaccagtaacacagttaattaggaagcattatgtgctgcacataattatatatgctgtacttttatatggccggcaataataattttgtttatacaccgttggaatagacatgcaggtaatgtattaaaagggatcagaaagaccagctctccctaagggcaattaactaggagttaagcactgttaaatattattaagaatgctaatgctatgacaggtctttattgtaagcaccttttagtgtttactttccccacaaataagctaagctgctgggaacctggccagtttgagcttttgattgacagctgtcagattcttctttgtatcccattaccttgaatgggggctgttagcttaataatccctcttactggctactggctaaactgtcatagtgggatcttggctttgagcacttcatggatgccttaaagaagctagacttgggtacaaggagtacagcgatcaggactgtggctgaggccataggcttcagcttctgggggccttgctctagaccagggatctcaacccgtgggtcatagccccattgggaggaagagtagggctcagcctcaacccaaaccttgagaggctggacctacaggaggcttgtcagtggtgcttttaaagagcttgtgattgagagagtagggaagttcacatatccaggctgtcactgagagagagattcaaaacgtaagcaccagcatgccatgtcccctctctacctgtgcaagcaggttgtttgtctgaggagtccctctccttcatgatatccctctgtgttttaacagtaggacccaagaagttcctctcctgaatgatatcttagtttacttgtggtctgtatcgtgggtagagcaggctgaactgaattgtataatggtcaggtaagacccctggggcttccgacactggtggcagaggcaacagcagtggcaaagaagtagcagaactgaagagtgagtgtcagagggtgcccgggagctgagagcctgatgtctggagctaaggcctgcatagcaacaccaatggcagaatcctagggtagctaagaaaagtctgagaagccaagagacagggaagctctaaaagctggagctgagagttcaagcattgtaagctaggcttgctaggagctttcaagagttctaccatggaccgaggagcccagagtcccagcacaacacatctcaggagccgtaaactgcttactgggtcttgattctctatgtccccggggcattatgcgtctaccttaagcaccagaacaaaaggtcttcagctttggacagagccaaggaagggctggagatggctttcagattcaagtgccttttttcccttcctttttggaattctgaaagttacacctttctttgattgaggaaattctcagtacaagttcaattaatatccgtaatagatggataagccgaagggtaatggaatgtgaatgttcacgatttcccctgtcagttcctgacccctggtgctttgctttcataggagacagcacatgcattagaagcagctgcaaaaatcatgacagagaaaaatgaacttgaactcaatgaagtggcattgcttcctcttaaagtgaaatggctagaggaagaattaagcacgcttggtcgaagcatcagctgcaggtcacggatcctgcagacgtacgtggcatttcgaaagtcatccgaggaggtatggtgtgatgttggcctgcttcagcaggatggcctctgtccatctttctgctttctatggggatagaaactccacccgagcgagagtttgtctctgccagtgcttgtacttacttaatacacccttcccaattcaaggcaccacccaaaacttcagagtaagtaatcttacctagaaaaatataaataggtatgtataaataatttattataacatgttatacatccttatgcctatcctaaaaaaagagaaattatgaaactattcaccgtttagaccatagatccctttaaatactaaaagtagtagagtaatgggattcttttgtttaaaatatttattattattattattattattataattaactatgtgtaagagtgtggggtggctgggcatggtggcacacgcctttaatcccagcactagggaggcagagccaggtggatttctgagttcgaagccagcctggtttacaaagtgagttccaggacagccagggctatacagggctatgccctgtctcgaaaaaccaaaaaaataaaaaaataaaaaaataaaaagagtgtggggtggatgtgagtgtggtacccagagaagcaagaggaggctgtcagtactctgtggatctggggttacgggagattgtgagctgcttggtgtgggtaatgaacaccagactcagatcctctgtaagagcagtgtgtgctcttggctgctgagccatctctctagcaccaaaatatggagcattcaaaacgaagagaacaggaagacagagggattgactcattcttgaatccatcttgcttgatgtccggatgccttgaatgttgctccaggcttcttctgaagcttcatcttgacatgcttagagcgagctctactattccctcaagtgtgtgaagattactcctcacaggggaacgctgcttaagggtggtatcagtcatacgagagtctggattctggctcccgaaaaccctgtgtgaactcagataactcttctatgaagggttccaggcaccatgttggtgggagcaaggtcctctcaggagtgtagctagctaaagtcaggtagcatgcttggctttgacttctcacttctgccttcctaataccttcatcctctcttcctaccagcaatcttaacagagcatcatcctaacctaattttgagccttgatgttagagcagatacaaaacaatgcttggcctccacactattatgccccaaatggtacctacctagtaccacgttaagcatctctttgcatgtcccatgctggcatacggatccaaaatcacctggagaaatggagctttataaacaacactccctaaaataccacatgtccttcagttttcccacttccactcaatctccttccctacttgatagaactttccattccaatctgtcaccccctgtacccctggccttcccttttctaactcaatgactcttggtcacacattcctgttatactccctgaaacaactccctggcctctaccccatatgaaccctgtcaacttccaacactcggtcagtccaacactatctactcagcttctttgttaaagcttccagacacaaaagcagacagttgggatgattggcatggttactaatttgtgggtctgtatctctgctggtcccccattgacatattgcttggtcttcacaacaagttattctggcttccattctcaaatctcagctgatgtctttggacttgagatacttcaggagacaataagaccattgaggctcactgtctggacttccttctacttcccagcttactgaagtatattcacatatgttccccatggctcttgggaagtgatatagtcctaccaagccgtgatcagtgatcgtctcttcctgtgcagtctgtttcctttgaaatattgctttctgctcctcttatcattttcctgcccttcattatataaacctttggaatggtatggtgatatttattgaactatacaacttttaaagcatggcagtttgagtactgtcccaactttaaaaaaatgatttattaatttttatttttatgcacatttgtgttttgcctgcatgtatacccatgtgaggatgtcaaatcacttggatcacagacagctgaattacagacagttgtgagctgtctgccacatgggtgctgggaattgaacttgggtcctctgggaaagtagccagtaatcttaactactgagtcctctctcttgtcacccaactttctactaagacccttattggacattttagtcatcactgagttcagtatcttctctatgtcccacaatgagcacttactttgtgccccaggcctttaaatcctgatttcattgtgttcctatgattctgggtcttagttacctagtattatctgtttacaggtgagggaaactgaggcttggagaaggttgacatgcattgtcaggcagatcccatcccccttgcctttcctttgtcaaaggccacgcgtccttgcatctactgagacaactacagagagttctgcataccttcttcgcaatttgctcaggggtttaccagtccaaggtctcatcacctgttcactattaactatatccagctgatgagaatgtcatgattctgttggctacagtagaaagcaaggtgaaacatcccacccagccttatcccagtacaacgatctttccggacttcttgccagtcagctgaagaatctgaatttcattcacgcgacagcatgcattttccctgatgacagtggcgccacactttgcttttgcagcagtgcctcccatccaagaccttctctcactctcaccccagcaagggacagaccaaatgtcacctgctggaaagttcttctgtacttactccgtgtagagctgttgttatccctcctttgtccctatgacattgtttgcttatgtgtacacagacatgtctcactggcctttttctcgcagaactcactttggtctctaaggaagtaaacaaatcttagtaggggatcttagaatcttccatggaaagggcatccttctgtgtggttcactaaagataaatagaagaagaaaattaaggaaaagatggtatgagcttaggaaacaggcatcaactgaataagtagaatattgggatcaggaaagagactctggccctgggagctagtgcaggctggctttagttcattccaactaagaatgatcttgaaaccttcaaagtatggtgactattaaagtatggtgacgattgcctgaaatctcatactgtgtttccatggcttttgtaacttatgaattccacgggtcttgtctgatcagtcattaaatattattcaaaatgcatacaaattagttccaaatgcttcctactaattctctatcaccccattactcgttaatctatagttacacatttgattgtatattaactctgctcaggagagtaatttaaaataattgagtactgctaatattagttaacgaatgcttaaatgtagttctagggaggcgaagtagtatgtcttaataagattagcttgtgaaggtttttaatattaatgcttacccagaaaactcatcattatttgtacccttttcttatggttcaccatgattaaaaataaattgtacagtagaatgctcagccacaaatgggtatgaacttcacccaacccccaccaaggcacagagggtgagcagagactgtaagagctagaggtcggggaggggtgcagagtagtgtcctctagacaggacaggaacactctgctagtgaattcacaggagctggaggtattgcacaaaatcaagtccatgaatgttctagcatggaaagtggaggagggctctatctgaagaggtattgagaggtggtggctattggggtgggggagagtcagttttatttttatttattattgcatcatatctgtgtatgggtgttttacttgcatgtgtgcctgtgtacctcatgtatgcctagtgtctgtgaaggtcagaagagggaatcagttcccctggaactggagtgacagatggttgtgagccatcacatgaatattaggaattgaacctgagtcctctggaagagcagccattgttcttagccactgagccatatctacagccctgagatagttttccttaaggggctaacctctggtaggttgactgtgctccagtggatggtcccacgcctgtgagtatagatcggcaacacaagttggactcagtaggttatagttataaaacaaagaagagaacaagaagttgggagggagtcgggaggtgggggtggatctgggaaaattagagaagtaggtggtgactatgatcaaaacacattgtattaaattttcaaagaattaataaactattacattaaaataacaaatcataatactgtaatatattaagtactattgtcttttgctgaattgctctttttctgatttgtatgctttgatttttatttgttccttttttaattataaaactcagttttaaacagagcagccacctgatctctgaaataaattattctcattgtagaatatacataaaaataatctagggtgcaataaatatttctgattggcaacaaccttaccacttccttttgtccgtcagctatctaagcagattcttgtggtattcagaaccctgaaaatagtcaataattatttaaagaatgctgaaaactagagtttcagtttaattttatactggctccaaatggactctgtgtcctttttatctaaaatatttcttaactctcatttgcctcctcctgttttaggcagaggagcagcttcagagcctaaaggaattttatctgactgaaattccttggaaagatgaagacgatgctgtggtcaagtgccagtctaactccgctgagaggaaatggcagctgtttttaaagaagagttttttgacccaggacttgagcctcgagtttctgaacttaataaacatggtgagaataacattaagaagccagcaccttttgtagatattattcctcaaagtcagaattacattcagcttgtctgttagttagccatgctgcccgagggaggcctcctcaacttcagtcactatggactagttctgaagccagcaactctaagttttactgtcgcagagcccatgtgtcacaagaaagctgcactagctactctgattcaagtgctacgtgattattattacagaattcccggaagtctatgtatgctcaagtttccagttatgttgacagcaaggccctacaaaatttccagggacccaaagacaaagattatgataaatctttgttctaaagaatttcttctcggcttaacagatccatatttttaattacaacttttaattagcttgcaaagtagtaagtttccgaagattgattttatccatccttgactttgctttaacgccacctccagcccgtgttctttccttactctcccatccccatccctgcttcagtctctccctcccagcctttcctccctttgtgttccttattgtgtgtgctctattatctctcccttgactcgtcagtctctaagtccttgtagagaaaagccccattgcatttagagctccatcctaagccttggtttccctgagttctataagcaaaacaccctaggacctttatgtcagccattcatctatctgaagctgcccatagaattctaaaaatgtggttagttcacttctccctcaaacacctcatgaatttccccaatgaaagagctcattttattgttgaggaaaaaaatgctagcggtttaaaaaaaaaaaaaaagaatgtttttaaaatgttaaataagtctgtcttcatatctcctactgtacctctgtagcgaggcaggcattaaaaccatccgtaggtaatttctcgtacatatgaaattctttccaacattgaaagcagttgctatgtttaatatgagtctttcctacagctacacatttgcaaatctatcatttgtgatgtcgtttaatttcttccttcaggctgatctgctttgccaaaatttctacttgctaaacccgttcatgaaatggaatcgggagccgcatggcagtcaaccagacattttttttccttgtatttgagagacgagggcactaacactttaagcagtaatctttcttaattgttctgtgattatgtggtgatccagcaccactcctatgaccttttaagtcctagattctgtcttgtcagggctctctgcagcagcaatttagcatcttcagaagatgtgggcctggatagttcttgccttacttcatttggccttagactaggattcatcttgttaaactaatttagatctatctactccattaactatttctcttgggtttcattctgtagatttgtcaagccagccttctataattgcaattacttctttaggaaaaatgtctaaaaggaagattgacatcctagttcctgaagtaatatattgattagcagcttttttttttaaaggaacaattaatgctttcactatgttttaatctaattaccactgtgcctgcgagtgtgtgtagcacaacttctgactccgtttttgagcccttcttcacagatacccaagtgatctgtaagcacggatccgaccatgtgaaacttatccaaacactgaataggtcccatctgagaaccaggccatcttcctttctctaatagtctagacctcctttctatagatgtttaaagatgactgacatttgccatttcctggagaactggggaatgcatctggagacagaaattacttggcagaatcgggttgtagcactcttatctctttgaccttcaatcatcgattttttttctttgttttgatttgtgttgtttgaagaacattagtgatgaacctgtgtagaagcaaagcactcattgaatagttgcaagtcagatcacagcctctttaagcatcagaaaaaaaaattcttgttaagccatttatctatgttcagataccaagttatttttcatttgaaacattgactcactctatcctttatttttttccacacttgcttggcttagtgtacctcctttcatctctagcttaggcatttatagtttatactacaagaaaattaaattatttgcaaattgtccatgttcctctatagtcttcttattgctgagttttagaaatcttttcaactgtggagatgccagggggtcttagaggtcaatgtaattgctgaggttttcttacacatccattcttcgtctttcctacatttccctggaccatcttaattcagggtgtgtggagtgtgtcctagtcacctttggtagcagcatctagggacgcttctgctgtgtgggttttcctcttgccttttgatctgcagtcctgtcttttctccaggttggcaaatccttatcaagtgtcaggaatcacatataaatcatcagatagtgttatcttcatgtggaatgctttgcagaaagaaatggacccaaactcaaatcttgtatctgtgtctaaattagcaggttattagaaaatcccaattcatagggttcctgaaaatagcctgtatcttcccactacttcctcatggtcttatatcttcacttcataattgttactttaagttcttttccatagtctagtgatgagttcttaattgataaaaattaagtctgcataataattaattctactggttggttgacatgctgataggtgaaattgctgataaggatggttttcctcatcctatccacagagcactagtcttgtaagagcatatttctgaagtgtggtgacgggcttagctgggggcagggagatggaggctggcgcttggtcttgagttgggtgtgtctctgagactagcattttcaagcttgaaattgattttttttttccatcttaagtttgttggaatcagattaattgactttggccagagttctggcagatgaatgtgccaacttattaattttcagtggtgaatattgagaattctgccatgctttagccttctcactaccaaggcttctgaaaagaaagatcagagaacagtccgtggtgtgtggatgtaaatgtaaaatgaatggataatttaacaccttacttagactatgttacaacaagaatttccaggtactacactggagtaaaataaggactatgttcaataactagacagaaggcaaattattgatactaactcagccaaattcaaaaatcacttctaccctgctggtaactatcaacacaccttatgatagcttaccttttctaggcattcctcagaccactgtacccttatgactgcagttgacattggtaaaaaaacaattcccagcttatgctgcattaaagaatatttcatattttaacagcttcttaataatataaaaggtaccacaactttatttataacatacataaaattatccggtagagttactcccactgtggtctaatgtctttaataatttgttaaatttaataatcacaattacagaatatataagtttattattcaattttcccctaaaaccactaaaatactactgaggcccttaaagactctgcacctgatgtctccacagagactgtaggtctaagcacttgattgtgtctctgtacacagctcaggcttggtctgtatcctgcttgggtatgatgaagtacttgccacctaaaagagctgaatgcaaaagaaaaatgtctctcttaggaaagaaagctattacatggattattaattcaacaggcaaaagagaatgagatattaaatgttaaaaatgaaatgcacattatggagaacattatggaaaagcaaacaaatggaagggaagagctcagccatctccgagtggcgtggtacctcaaagctatcgaaggcaagcctgcgagagagcagtgggaaatgttcaaagagaaacttacaaaggtaaggaaacgggccgggcaatggctcggtgcaaaacatagcatagtaaagcactgggtttggaccctagcaaggaaacaaacaaaaaggcatgccgaatggtacttctcaaagaatatattctggtctgtgcagtgtgatagagcctttaaaccacggggtaagagaaatcagccaagcacaaaagtgcaggaatctcatggttctgtttatttgcagccctgtagccaaattcagaaacaacgatcagaatggatgcttccagaggatgcaggaagggaggagggaacggggtgctgttaacaggttcggaggtcctgttcaggttgatgaaaacaatctgtaggtgggtggtggtgacttaattgtacacatagaaagggtaaaaattgggcattttgttgtatgttatcatgatttaaaaagaaacaaaaacaaaaacaaaaaacataagggctatagaaatggctcagaggttaaagcagtggctgctttctcttccaggggtcctgagttcagtacccagcaaccacatggtagctcacaaccatctgtaatgggatccaacaccctcttctggtgtgtctgagtacagcaacagtatactcatacataaaataaataaatagatctttaaaaaaaaaaacaacaacaacataaaaatcacaggagatcaagggacatgtgtgacctccctggaaaggatcagtgtttacagagattgaaaagctctgtcagccggcacactgcgtcaccaccgaagtgaccacatgtgctgagttgccagaaacacatttctagttgtcaatgtctgtttcagactactcacagtgtaaaacttctccacgaagttctcatgcctgtctctgcgcttgaccttggggggagcctccagagcacgtcagatctgcggaggaggtggatcgcaatgaagcctcagctccaggtggacatgtcaatgaatggatttgggtgaatggaaagatctctccaaaatccccagttacagtttgtcttctaaacgtcctttctctttaacaaaagtaccacttttctctaacaacacattttcttactgttcccatacatactgttgtatttgatgatacccaaacatttaagccataccatgtcctgtttatattttcatcttacattaatttactttatatttctaattaacttattgacatatttaccatatagccactattttcttagggacttttttaaaattaaggcacctcagaacaaaattgacaacatctaacctagagtctgtattgtcgttggtcaacaaatcactgggatgtcactgttcctacccacaaagcatactgactctttccacacccctttcctgacaatttattttctgtgggcttcaatcatcttccaaggaagctctcagattgattgattgattgatggattgatttattgattgatttttgagacagagtcttaagcccaggctaacctcaaacttgcagtatagccaagggtaatcttttttttttttttttttacattttttactttttttattaggtattttcttattttacatttcaaatgctatcccaaaagtcccccataccctccctaccccactcccctacccacccactcccacttcttggccctggtgttcccctgtactgaggcatataaagtttgcaagaccaaggggcctctcttcccaatgatggccgactaggccatcttctgctacatatgcagctagagacacgagctctggggggtactggttagttcatattgttgttcctccaatagggttgcagacccctttagctccttgggtaatcttgaacttctggtctttttgcctccatcttcccagtcctgacttacaaacatacactactggatttttgggttttgttgaaaaacttaagatgcatctgtctgttactacttaatatgtataggctttgaggaattcctgagttagatgtttggagattcctttgggaaatatctaattgttctgttaagctaaaacatgtgaagtataaccactatagtctgtacacatatgcatatatgtagcattggaattcacagcaaactctcctacccaaactctcattaagtgtggctagcccaatttgccaaatcctgtgtggtataaatacacttcttttggcatacatgtttaaaggccattgctataagtatttagttctgtagccatggtatgtgccatctgtttgaggtccaaagacttgattagaacctgacaatcctatgtaagtctgtctactgaaaattatgtcctcagcctgcagcatttcctttccttttacctctgattcaagatccactcttgggatgagagtagcattctctagaagcagtctagcagtcttttgcaagctgtcctccagggtctggattcctacatgggctgtctgagcagtgctgactgaaagggaagacagttgatcccttctctgcgtggtggctatttgtggattacagcacgactgctttgaagcagcatgtctgtgtgctgatcagctggcagctcatactgatcattctttcactgtggagcacaagtattcccctgatgtatttttatacttctcttggtatccttatcataccacatgattctgttctatattaaatgtctgaagacgtatattgacttaatggaaggccagtacatttgatatatcatagacacatatgtccttccatttttacatctatctttgaaatctctacctttatcccccatgttgcttctaaggtcctaagaagataagatactgagcaatgtgcctctatgtctccatcattgcttaacacaacatctgggtttcgagaaggctcataggtatctgttagttacaaaccagaaagtgatgcgttatttagacaatcagaatcttcactgtaaaataggaactcacttccgcacaactttcattctttccagcaactgcatgaggatgttcagcaaatcacgaaagagtgggaagtgttaagcagtcagggagctcctctgaaggagaaggctgaacagctgaaggaccttgtccatctccaccggaggcagcgagagcgaatccaggaatatgaggaaatcctatacaagacagtccagttccaccaggtcaaggaagaggtacgtcttactgcggttgtttaaagtcacagggttgaaaggttatgattatgcaataaatgaaaagcagatcacttgtcttagtccaagaggtttattcaccctgacggctaatttacctctcactgttcctctatcctgcctcatatctgtctagcctggctgcagcctccctgccctttgaatatggtgcatgcattccttcctctaagcctccactcttgtcttagcgcttgctagcagatctcttccttccagcagcccccttcccaggtcaggctgggagtctctcttcgaaattccctcgcactcactagccacatctagcacctctagcatcatggctggcgctacttttttccaactcaagtgttagctttcaagaggagaggtggtcaaaagccaagttctttcttttttcttttgtcgtcccaagaagctttgagcgtgatgtgctcgttaaaaataatttattggttatttcatggcagctcacaaccatctatactgccagctcagagactcccaacaccctcctccggcctatgagtaactgtgcatttggtatacagacatgtatgcagacaagaagactcgtacacatccaaaaggaaaatcattttaaaaatatttttggagtttacttaaatcacagaccaagtgcttgctaattttggaattgtgggctcagaatgcattttgttctttcatagaactgaaaacatgacctgatccatgtgacctggtggagtcacagtagtgcagtgtatacctgtatcatcatccgtaggatgaatgattgtggatgggcgagggagcatttccacaatctagtaaaagcattgcggaaaatgggctttgggaaaagcaggttaagtgctaatgttctgaattgcagctggtccatctcatcaaaccaagagaactggaacttctagcacagcccatggaactggcaagttctgaggaggtccagatgcaactgggccgttcgcaagaaaggcgggcacatgtagaccatctccatcagctggccctgaccttaggagtggacatcatttcatccgtgcaacaacctgtacgtattttggaatctcaccattgctactctctctcactggtactaggaaagacacaggcagattgccgagtatatgttaaatatgaatggttgcttttgtgtgtggtgttggggattgaataaggaacctcatacgtattaaccaagtgtctcattattaagtcaccctgagccctaatgtgttaaattttaaaaggtgttagttctaatttccaccaccattaacaaacaagtaagtctaaggagaaaaatctgagcataaaaatcctatttaatgcatattattctcatgttaatttaaaatagagccatgatctcagatggacgttaggtttctgtatttgaaatgtgtctaaagcaactaagaacctaaacttttattttatttaatttgaactaagttaactgtaaatatcacaattgcaaatctctcagaaactacttgggcacgtgattccaccttagaagctgtaagttttgagaaatttaaatctagatcaagtatttctgatagaaatttagccacaagtgagaaaaattcaaatgatacacatattagatttcaaaggtgtgagattaaaaaaaagatgttaatactttcatactggatatgtgttataaaatggtaatatttggacatatgtggttaactaaattatgctatgaaggttaattttgtttatttcttctttggctttcaatgagactgttagaagtttttcaattacttcatggttcataatacatttctattggacagtggtgcttcacacagggactacaggtctggaaggctactagagtactagagtctgactacatgagcagccccattttacaaatgaagaggctgaagctcagagacactggccactcacctatagaagcccagagtagatgggcctaggtcctctgcttctggcctgggttctggccccagtttttgtacttgctttattccactgatgttaatggaggagcctaagagaacagaaaacatttcctagtcaaacatccataactaattcataactagtgcattgaactttgatgttttacaaattccccaaattcatactttaagggtggaaaggttatgtttatctcactatgaataaaaaccacaggtccagtttcacttgaaagtttctataagactcctatcaggtgctatgtgatagagagagcacagcatctattctttagttaaaaggcagagtatatgaatttgttactgttaaaataattcattttgccagtgaagacatttcctaaaggtttttattgtatctgtatatttatttttaaaactaagaagaaagtggaatgtgtcactttgcacaaataacacaaattgtgctccagtcctcttctggccttggctccagcatccctcctgtgctacatagagattggagcacttgcataatgaacctaaggttaaactcaagttgacgagaaaattacagcgctgaggcagagtgtttctaatgcatattttatgctttttgaaataaaaattagaccttatcatgagtggcgtctctgaggagttaggcatgatgatgagagtcaagaatagaaatgtctattccataatgttgagtgtctggcttctttctaacatcattaggttcaaatatgtttagggtaagataaattaggaccctatatctcctttgaagccatttgtgagcattacaatacaggcaaatggtatattgggtggccatctcacgggttcctgtttgttatttccacatccttcattcccagaattgctctaatatttctgcaaagaacctgcagcagcagctggaggcccttgaactggagagcaggagttggagtgcccaagccaaagaacatgagcgcgtcctgtcctgcagcttggagtactgcactgcacgtgatgagatcagtgaggtagggctttgagaaagggcacactgagcccaaagcatgtgtcccagtgtcactcacacagacacagacacagacacagacacagacacagacacagacacagacacagacacagacacagacacagacacagacacagcacagacacagacacagacacacagacacagacacagacacagacacagtcacagtcacagacacagacacagacacagacacagacacagacacagacacagacacagcacagacacacacacagacacagacacagacacagacacagtcacagacacagacacacacacacacgcagacacacacacacgcagacacagacacagacacagacacagacacagtcacagtcacagacacagacacagacacagacacacacacaggacacacacacacacacacacagacacacacacaggacacagacacacagacacacacacacacagacacagacacagacacacagacacacagacacacacacacacacacagagagagagagagagagagagagagagagagagagagagagagagagagagaacatcgggacatggtaacatggttttctgacccataccctttcattcacagggtacccaaagtttgagtaaacttccagctcccaaaactgttgacgttaggacagtgttaatgcatagaaaaaccttgaacacaagattgaaggtctgggatcttggttattgcttttctttcatcagtgtgtgtgtgtgtgtgtgtgtgtgtgtgtgtgtgtgtgtgtgtgtgttttctgcagcctgtttcattggacacagctttttcagggtgacatggctcactgtggcaggttgttgtagcctgctgactttctatttaagttgcactgactcagggggaaggctcttcgcttgggaggactgcagaacattttccaaagtcaagtaactcggttcctgttgatgtgaacagatgccttttctggcaaaagaagtttcaggggaaaggaaagggtaaggggtcccccttgctctttcatccacacagacccaatttccccatgcctccatcaatggttcctagccatgacacatattctacccttgtccttcacttcctgccccacgattaagatttgcattcatgggttgtgctggctgtctaatgctgagcatagtggtcttccacccatcactcacttgttctaaggaagacacaaggaaaatgacaattccacgtctgtctctatctttctgagtccactgggaaaggggtaaggggaaaggtagctaactaacaactttcttgaattcttagtttatgccccatctgtgtaatctacgcccaccaggtatggagaatcattagctcacgggttaaagaatgggtaatggagctttaatgatggtcttcactggagatcccacccttcctgcaggtcacaggcaggtgcaagagggagcatgctggaaagagagtgagaggtcaggagaagctgctaggatccggttcaagaggagggaccatggagaaggtgctggcatggcttttactatagcagtgtgctacaacgctgcatgctctccactcttcttctggtccgcattctggtgaaaccacagtgtattctgccctctacacaggggtgcagcctcttctgcttccctatgctacagtttacacttctgtgagctctgtttagttttgattcgagaatcatccagcgtgtcttggttctcccggggctatgaaagattcatggccattttcaaaaaagatctttttctaaattttcttagttctttccttccctttcatcttcttccttctctttttccgttgctttgcccaaacatctctcccttcggagatggcgcagctctgcaactacagagagagcatcggtgaagcaggctgcatgtgttcccagccccgcctctctgggtttccatgtccctgaagagctgtggcatttaagaagcttggtccccctgcctaaggccttccagaacttctatttacagggacagcctcatgatgaacttgcgctcagagccagcagagatgacatatgacccttccagtcatagtagggacgccccaggattgtctgtaccccttcaggaatgagcaagccatacacgtgggttttggtttaggaatcaggtatcagttaacacactcataattactaagagaagtatcgttctctatcgcttctacttctaatccaattaatctttaggctaccctttcacactgaaggaattttggaaaccttgagtctttttttactatttgttcttgtggagacacagcaggcatgtcgaagtgtggcatccatatgctggatttcacaaacacccagctagtggcatgataatcagaaagaatatcgttgacctttagtaaaataaaatgaagttatgtcttattctatgttgtaccatagctgtgaggagactcagttgctatatccatggtgacaacatttggcatctatatgtgttgtttagacatgggtatctagagcattataaaatgaaatgaagcacattcctattttcctggctcttgggaggcaacggcaaggaaggcaggagttcaaggccagtcttggttacagaacaagttcttcgaggtcagtatgggctacataagacctcatccccaaacaaataacaaaaattgaaatgctgtgtgttaagtagttttctgatacaaacaaatgaataatattttgccaaggaaccagaccatacttaacattttatttttcaagttggtcacaaaccactgttttattctcagtgtgatcaaagtagctcacaaaagttcccagatactgagttgcgatagactttggagaatatctggctttatgtcttcattttcattggagaccatgaagatgtgtgtgtgagggattcatcttaatgcactagaaggctgcagagcttctgtctgtagtttttggggctttgggggcttggggagtcaactttgagccaagatttacctgccagacatgaacatacttggcgtttgcttatcggaatgaactattgtctcagtacaatcccagccaacccttggcagtcctgctttccaatacatctcttataatatgtatgagtgatctgtcacaattgatttgattgtttccagaaaatcttttcttttgactttgctgaagctaactttgagtgaactcttcactggggcccttacagaaggactttgtacctcaaggtgaacgaaaggaagccgcttgaaatgccatttgaaaaataagatgtgatttcctttaaagacacgtaacagtgccttttgtgttacattatctttgcataattttatgcataggaagtttttgaaaaactcgttttcttcatgtttacccgtgagaaacacaactgtcaaactgccagattttatggcatttttttccctacccatttcatgcaaggatacattcgtatgcataacagctcaatagcactttggattttcttgcttggccatgtgaatatatcattaacacacaaaatatcctagaaatttccatgaccatattatattacaaaggaacctcatttgtttataatctacctttgagaagttagtatgctgctacgtttccttcttacaagctgaccaacaaaagaattacccttatatttacatgatgttaatggggatttataacttaaaggctcctattttgtgtcacaaacaattactttgctgggaagaatgggatgacagaatcaggccgctatccattttctcaaaataagttttccacacagaagcttccagaccgttacactaccttacccgggaaaatctcctcgaggacagcaacagctttcctatcagaaagtaagaaggaaaggatttagcatatatattccatataccaggcatgaatcccccaaattctgttgcaaatttgaatggattggtcatctgagagccagccacagaaactggatcagaagcaatagattataactgaggagtgatgcttttatataacacgcataggtgatagaatgaaaaccacactctactgtctggcactttgccgcggacaaaatgagcatgggtaccatccactgcaggaaagggcacaggaacaatttacatagggaacagaacaccagatgggcatcactgagaaaaacacagacaatgttcatttttccgatttgtaacccaaacttgtcttcgaaaaaaaatagtaaattgtctttatccaacaaatgtatttcatgtggctaccgagagccatgctgtaactctacaaatgtctgtaaaacacagaagagtcttgagaaacttaaaacccacatggtacttcagcgcccagccatctgctcagcaggccctgacccagctggatttgggtagcatatataagtggacaggaaaaattacaatttgttcagaaaatgttcatcccaaaggcttaaaaatttaaatcgtagtgtttgatgtctgtaaaataccatgtaggatcttctggaaggtatggacagctcacgtttaaaatgatagttaccctttcccaaagtagaacaaacaaaatgtactaaattcattatgaagatggtggacattcaagacaatgtttaatgctgagactggctgcagcttataattcagaacaggtctttgctttatgacttgtctcacttccttttgctatgtgccttggagctaaggaagatgttctctggttaccaagtagaagaagaccaaagagacttctccagaaatctgtccaacatggagacccagtgctctccaataatatttgcagaagctcatccggattagattttgcatctttggatgtcttcgtttagaatccaagcatctctgggtggtggtgcatttcagcctttcattatgagtctctgaacttgtgaagtggatgctagagaaacaaaacctgactgctcgttttgaatttggaagttcagccagtatgccacagtcctaaagcaaggttttctttgcaaacccattgccttggttttaaatagcccatgtccctcacaccagttggccttgccagtaccagacttacacatcaggcattcttgtgaaagctgcctcagccagcttagtcaaggctaagaatagcgagccagcctagcctgtcaggagctcttaaccttctgtttctagagaagttttctcatttctagccctgaagagagacttatcactcactggggaaattatgagaggatacgtttcaaaaagagagagcgagcagttttacaattttagaattttttctaattatggcatgtaagtttgggctacttcctctgtacaaacacagaggaactgagcattacacagaggaaagaatcaactcactcactaaaaaaatattctaacatccataatacataaattttactaattcgaattatagcgtttataggtttctagtgaataaactattccctttcccatgcagttggcgtgtgtggctgctcatatgtacaagcagggcagttgtctgacccgtctccaccatgccctattgttgacaagcttgctaaagttagaagcagctgtgtggacaatgataccccagagcagtaaccagagcacttagttcctttaaaactgggataccaacttacgtggggattagattaagttttcctattggaatgtgcggataagagaaatgtggtgtggctggattcgtggatgctagaggcccttcatccacgctcccttctacttgtatgtatagtgctcttgaatttgcattaagaaaggtacaagagattagattttgactggctttccaatgtgactaaacaagaatagtgccagcaactctgtggcacaagcttatgtgtcagaatgaagctctccagtttgacatacccgtagcaccgcaggcattctttggccttctaaatcacctctgtggacatgcatgcatgctgggcatgcagaaatgaagtcgttcttaccagttcctaagtctgacgtttcttaatcttcttagtaaattagaagcacatggcttagaatgaaagtgttagggatccatctccccaccatgctcgtacagcattcaagtagatgttaagccttcctggttgaaaaagtgaataaaaccctttggctatccagttgatggtagaacttctctttcttcctctagactgatcaataatgatgacatgattcagtaaatacagtaaggtagaaagctgtgttatccagtgtataattgtcagtgtctgaacaccttaattccttttgtaatggttattttatctattactttattgtattcagttttattttgtgtgtgtgtgtgtatgagagagagagagatatatacgtgagtgcgagtttgtgtgtgtgggcacaggtgctggcatactacagtgtgtgtttgggagacagaggacaaccttggatgccagcccactcttctaccttgtttggaacagtctcttttgagcttctgggaattctgtctctgcttcccagagactgtaatcgcaggattacagactaggatcacagacacatggcgccatgcttggctttacgtggtcccggcagatctgaactctggctctcacatttgtgcatcaagcgtatcccactgagccattcccaaaccttgctgcctcctcctcctcctcctcttcctcctcctcttgctcttcctcctctttctcctcctcctcctcctcacactcctcctcctcttcctgtttttttggacaagctttcactatgtaatctagattgtccttgaatttgttatccttctgtgacattcgaagttctgggatcctaggcaatcatgctcacagcctagataattttgttgttaattacggtaaagcattgtgacattactctgaggatcttagccactttttgtgtgctgctcagagatatttagtacgtacaactcagagtgcaatgcggtattctccaacagcccaagtttgtaatcatctcaaacaaaatacctatacagttaaataggaacttgccactgaaggagtttttaaataacaatctcgggctgcctcagatatggtatttactaatttatagttgtagattaaaaacaagggatataaaaagattgtacctcagttttctattaataactcagggtagtttctttgtacttcagtattataaatggtaccacatttgtcccttcgtgctagaattaatacatgtacattaaaatatcaagtgtcacagaatgtagatatgtatttaatagccatttcataagtataccaacttaataggacattttaaatatttcctggtcttctgatatggaagtcgttttcaaaatctgaagttacagccttttccaatctttctggacattgttgacttatctgttaaaatggtttataacgtcttcattcttggttctgtgcatagtgcaaaattaatattcagcaatgtcattttctatgtaaaaaaaacaatattgattgcgtatatggatatcctatgcaaaaactgtataagtataataatttctacatagacaggtctgccagagccttgcatgtagtttgttccaagaacagttaaagataaaaatcaatgttttattttcacactatggaaagtttggagtgagcattctgagaaagcgtacattttctggggcagatgtatttttctatattatggacctaaggtgtaacgtgtgcacagcttttatacactctcgggtaatttgtttgctgtcattgaaaagaattttaatgcatttctaacttttctttccatcattcagatttatcagccgtgacgtgatttcttcttgttgtaaaaactcccatataatcttaggtttatgttttctttgtgcttctttttgctgataatataaagtgagagctgtctaggagggtgcttacccttcatgaatatgtagaagcaacagaaagcaaaatgtttaaaagtaccaggttgcttagagttctagtgcgtgggtaaagatgaactgtttgcaagactgtcatactatgccctgcctacatgaagccagcattgccctcagtggcgatgactcttgctttggggttttaatttgtttgtttgtattttcagagttaatggtctacatctaaagagtaaaactatctaaattttgctcatggaaataacttcagctgggcaaataaaatccctttctcactaaatttcatgtactgtactaaatattctaagagtcagcccctcgttgacctcttcatcatgaacagctctttggagtcttaataattttttatacataatgactatgagagagtactatgatatggaaagatttgtaacaatactagcatgcagaaaatagaacgagtgtgaaaattataccaaaggaatacaaataagaacatttgagctagcaagagtttatgttcaagatgttagatactttcttgtttagcaaccaatgggatagtttgtaactgtactcaattaaaaatcatacatcagaaattactgtcattgaaagatgaatgtccatataaagagttagttttgactgaaattattttgaacacatttttaagattatgaatttgaaaatgtttagatattttgattcacacaaatgaatattgactttccaattttaaggggattataattttatttttttttattaaactgtagctcaaagagtcattcaaagacataaaaaagaaattcaacaatctgaagtttaattactccaagaaaaatgagaaatctcgaaatttaaagactcttcagtatcaaatccaacaagtggatacatatgctgaaaaaattcaggtaatgagaaagttgtgtgtatgcaagcatgtgcacgtgtgcgtgtgtgcatatgcatgtgcatgtgtttgtgtaattactacaatttgtgcaaagtaactgcagtccaggcataactctattttacagaattgatgtgagaagggtagctttctatttttataatactttgacttcttatagaaaatgatgatttatctcatttcccctttccaaacatcaattttattctctataattcagagttggctttcctgggaagggtttagttatgtgcttggtatccagtcatgtgatggtgattttaaacagatggacaggaaagagttcatagaataatacatgacagcattctaaccagagaacaacttctatcacctgcaatcaagcgcgccactattctgagagttttctagcttattcactgttcaaatttcctgctgacacctgaaaacaaaggaaatgggtgtgctctgggggtaccatgtgtgtgtaaatgttgtacgtgttcagtttgtgtaaatgttgcatattagttaagccaggtgagaactgtctctacaaacactcacagtttattctaaaaacattctagactcttgcatttgacagtcaccatgaccaccagcatgtatggttgccctgttggctgcagcaatacatcagaccttctggccccatcactgtactctagcaccagtgatgcatgttgagatgtgtatgttgagttaccactggaatgctttctgccagacacacaggtctgtgtgcttccatgcttcttatcacctgttcatgcatacacacacacatttccttcttgtgtccttcaccctctttccttccttgtcccctcacatgcccagagtgtctaccatagattccagagctcctgatgactacatatacacatacacattacatatacatgatctagattatttgtaggttagttatttatgaatactgactgaataaaatatctaggagagaacctattctttccaaagtgcacttacagtgattataattttaagataccagaattgtggaggcaacacgttttcccaagttattctagtttaccactaacatcataactaatatacaatttcctgttaaacccccccccacaggctctaaggaagaaaatggaaaaagttaataataagacatctgattcattcttaagttatccaagtaataaagctaacatgctttcggaagccatggaggatttgaaaaagaacgtggatgactttgacaaagttgtgacagattacaaaatgaatttggacctgactgagcatcttcaggaagtaatagaagaggtattttcttcttgttgtaattctattcttgccataatgctacttcagaaaaggaattgttctgagcatggtgtaagaggctccaagctcaggtacagtttagcctctatagtaagactctatttcagaaaaaaaaaaatcttgctttttaaaaagaaaataaatgcagtattagttactgctgtcatgacagccctggccatgctcccctttgttattgatttaaggtaattcccagaagttgaactgtctggtcaaaggtgatgaactgcacagggttttgtttttctgcactgtccagtggctctgaagaaagcttaggttaatttactccttctcccaggaccacaagagtttccatttctccatcacctctattcaaactgtctaaccagtgctaccacacaaccactactagaaagctgcctcaacacccaagcagcctacttatttcacaacatttgaaagcatttcagaataacccgagactggaatatctcaggtgcttcgttactggtgttgtaacctttgttactgtgaaggggacagtgatagtccacctaaaacatatgatatttgacaaggtccggtcactgcctcatattttatatcagagaaacaacacctaagagtcttgcgtgtcctttgttgcctattattctgacatacaaactgtctttacagttaatacagttgagtatttggacttaacaccacattatggatgatcttattattctgtgaaacatgatgtacaggtttattgaagcttcttggcacttacttaatgctagcttttcacagagtcctgttttgctattttttacctagcacaaatgcctctggcctggggcaaacattcctcctgtcacaattacttatttttagagaaaaattgcttcatacctccactatgcttcaaaataatgactaggtttatttcatgaaggtagaattctgttctttggatgatagttctttggcccatatctaaatttcattcatatgtatatatatatcattagaaaacttgttcttgtagactaatagcagtgtttgttgattatactaaattttgagtattatctacccaatgtttctattctttttagtgagcaaataattttgctgcttgctcttaaaagtatacaacagtgtcttaagaactgtattttaggcaaatctaggaaggcaagagaatcaaagctatgtctatacttttgccttctaacttttcttgtgtgtattctttaattatacttttaaaatatgtgccctggtacacatgaaaatatatatgactgtgtgctgatattttctttaatatgacttggaaagtttaaagactatatgaacataaactctgagaaaatcaaaacctgaagcatccttggtcagtgtgatgaacttcaaaaggacacatacgtctcttgactctgctttcttccatttgaatatagtgtaacttttggtatgaagatgcaagtgccaccgttgtgagagttgggaagtattccatggagtgccaaacaagggaagctgtggacatcctccacaggcagttcaataagtttattactccctcggtgccccagcaagaagaaaggattcaggaggtcattgaccttgctcagcgcttatatggtgagctcatgtgtgatagtgatttgccaatgaacaaatctgttctgaatctgatccagcaggaaacagatcaaagccctcactatccccacctaggctgagaaaagtctgttctacagccagcagaagtaagcagtagggaataactgccctactgttcttcccacagtaggagatgaagcttggttttaaactctctggtatcagcccttcttccctagtaactctgtagtggatcctttctattcttagaaccagaaccacactctataaagacacagagtgtaatgtcccctaagtgattctgtgagcataagaagattccgtgatgctggtttcaaaacttcccctaaggatttccatcgtctcgttcccatgaaatttgatttgtggattggagaaatgactagagaactctcccgcgtcttccactcacttgtaaacacacgggagaactctgtcaccccatgaatgctttattctcctccgtgatgagagagtagaagaaacctctccataaaggaagtcccatggtgccaataatgttaagagagcatttccaccgattctctgatgggactcctgggagacgaagggagatccccagggaccaggcaaaggcagcccagagcaagacatcagaagttggttcagaaatcatcctctggttgcccagagccactccagctcccaacagacattcagtccacagtatgcagccttactcccagacagatgcaagatgcactgtactgcctaatataagaataaattgtctatttttttcaaaggaaaatagtagcaatacacaacactaaaatattatctggaaagctaatgagaagaaacagatgtctctctcttgccattagtaaacgctgtaagagaaagtctgaagggcatcactagcactgtggatatctgtctctattttacacgtgataatatagactctcctttgtctgttttctgtgctggcgagggggagaatataatatgctgtattaatatatagtacctgttcaatgtcaagacatggtaagtacttacaaagtactataaaagtcataaccttctacactttgcagagttctgtgtcctgccttttgtgtgttctgagtcgtattactaactgatatatgcattagttagttgttgtttggattaccccattagaatgtaatttccatgagacataaagccttgcctgttaacttgagcatcatagtacatactaagggctcagtaactgttgcaagaataaaggaataatagaatactatgattgaaaataaggattctatgagttttcacacatttattatcgagtctacataccttttaaaatattttattttatgcctctgtgtgtgtgtgtgtgtgtgtgtgtgtgtgtgtgtgtgtgtaaacagaccatttataggtcagaggacaaattgcagaatcagctttttatttctaccatgtgagtcctgggaattgaactcgggtcactaggttcggcaacaagcaccttaattcactgagctatctcaccagaccaagaagctatacatcttttaaattgcattatgcaattatgctgggaatatgaaataaagtcgtgcagataactaaagcattgctgaaccctgaacacttagattttgcatttattttgggtccggtagagcgatggatgccacagtgattatatagaggtcagaggacagcctgtggcagggagttctctcacaccgccatgtggatctcagggtcctagctcaggtcaccaggtttgaaagcaagggcctttccatactcaacctctgaccagtcagaatcctaacttttaatgcagataaatgtatctcagaaattgatagtgaatgcctactttgcctattatgcgtatctgtattgattgtgtgaaaacaaagaagatacagtacctacagtcaagaaacgtgatctagacctaaaagtcaccacgttgcaaatgcttgtcttttgttatatgtgtgacttttctcttctgttactggtgttagagattgagtttggggcctgtcatagtggggttttgtcaatttaatgcaaatctagacatatctgttaagaagaaatctcagtaataattgcctccgtcagactggcctgtaggcatgtctgtgggacattttactgattgctgattggtttgaggatgccaagctcaccatgggtagtgccattcctgagcatgtgagcctgagttatataagacaagtaactgagcaagctaagcaaggaagcctgtcagcagcattcctttatggcctctgagtcagttcctgccttgagttcttcccttggcttctcttgatgatggattataaacaataagccaaaataaatccttccctcctcaggttgcttttggttggtatcttcccaaagcaacagataagggaaccagacagggacgcggagatatgaagcaagcactcagttactcttacgcccatagcccagaatgagtatcctctcataaggagtgtgtttccagatggctttcagattggtcttggtgggacatggttgtggaattgcctgagttcttttggatatgaaccccctctcatcagatgtaaatctgaggcaaacactgtctgccattatccacattgccttggcgagttgctccacatctcactctgtggagcctttttctctgacacactcccatttgtttaggtttgcttttgttccctaggttttcagagtctcatctgaaatcttccactcatattctttgtgctttcttctagtagttttaacattctgggtcttgaaattgattctttaatccagttcaaattgatttttctaactcataaactgggaagagattgtggtcaaggcccattcttttactatatagagatagataatagatgatagatagatagatgatatgatatgatataaatagtgatgatagaaagacacagagagtatggatagagatagatagagataagggagataaagatatgtaggaatatttgaacatagatttactgtctcagcttgtccttggattaaattatttcagagaattaaaattacacacatctgtggcagacaggttccaacgagatgatagagagccttgaatgccatcctgggaaatgtatattttccaagtggtgaagaatttctgaatgtcctggataggaaaccctgattcgtactgtgtctttagagcactaatatagtggcattatttaggctacatacaagtggcaatggtgcagcaaatgcactctattttaggactcctgggctagtgagttttccatcactgtggcaaaatagctggctcggagtttcagagccatcatcccatgcctggcttgttccacttctttgggcttaggttcgatagaatgttttggcaacaagactgtgtagcagagaaggcttctcacattacagcatccaaaaaaaaaacagggagtgataaagaaaagcctaggtacaagatatttcttcaaagcatattccccaagcaacccatttcctctgatcctccccactttccacgggatctactacctcccaatagtcaattcagttactaactgagcaacaagcaaatccactgatccagtcagaggtcataggatcctttccaaaagtccaacctctgaacatagcattgagaaccaaggctagcattgatatttcctaatcaaaccacaatcccgacatgggaatggcgcatacctataatcccagaatttaggaaatggcgattatatagtaaatttaaggccatatctcaccttcatctctccctaccccacgacccaatatccaaatatatctaaacacttggcctttaaaaatgcctgcattcactgatttctgttcattgtgtgtttgccaggaaattactatccaccagcatttacaaaagacacttaggaggtgaattagcatccagttttttcctattttcttgttaagaattctctttacatatagatttatctttgctccttcccaggtttggaagaggggcagaaatatgcagagaagattgtcacaagacacaaggagattcttgaatctattactgaattatgtgggtctctcgtggaacttaaagaaaaactgatggtaatttcttctttctagaatatgtattatcaagtgatataaataaaaatgtgttaatcaaatgtcttctggtacagggatgttctacaacaaattctcaagaggcacaatatgcacatttgtttcacagcattctaacatgattatctggggggttgtgataattaatcctgtttctttcccatcactgcagagaaaaatgttgctgggaatgagggctaaatacaattaaggtgtcttgtttatatttctgtggaccatatcccagaggataaatgtgtactgttaaaaccaaagcaaagtttattaaggactcttgggtttatgttcataaataatagatgtgatcgcttccttcctccaaattatggcaccaaaggaaataacactaatcttcaggtattgtttttattgagcatgtagtactatggaagtcttaagctaaccatcacaaccttcatagaatttaaataaaataatatgtgaaaaacaaggtaaacacttatgatggctatgatggacaaatgccaactaaaggaaaaatatgttgttatgctctgaaatgttttgattgatgctgcttttacaacttaatgaggtgagctggttgagggtaaatagctatgtcaccaagagcataggttctacatcagaactcagttgccttggaatacctttgggttacaacttgggtaaattgttttaatctctatgggactagattctctaaccgcatggatcggaatggatgccactgtggtccgcaggcttggctgtgaagctgttcagtgctactgggtatgtcatcgtatggttcatgcctattagtgaacttgccgttcatgtggagttacatatttcatggcaaagagttttatgattttttccatgtcataaacttgagcattgactcaatttagataaactggggaattttaactcagtagttacataaccaagttgccatttcccttctgttaagcatcaagatttttcaacttatatttctaccattttttcatcacattgcagtgaacatctttgtgcttgagtttttcattcttttgctgtattttgtgctatcgacacacaaattctccaatgcagatgtaaagaatttaattgaaatgctatgcaaaatgaccttgtataaatattttacaattgcaaaaccactagtgtgattaagccatatatcctagattatctttgtgaacatcttacctctatttcaactccctgggttcctgttttttttttttttccatttcatacatgtataaaatgaaaatcctcctttctcagactctgctggccatcatctatagtaccctcctttatattggacatcttcagcttaatgaaatctagtctcttcaaatgtgattcttttccatccttcatttccatagctccgttcttggaagagctgctcctgtaacctgcctctactctctcattttctatgccttggacactcccttcaattaggattattttgctattttgcatttccaatccagcattcagatactcttttattctacttgcaagtcccttgattctatatctggtgtgattcccctttctgaatattgctgggctcatgtccttttatgttaaaagccttcactacacgacccttccatggttttgagacttgacacattctccattgcttctagattcattgcagttcctgtctaaccttccttagtgtttctactacttgacttttacttcaagtgcatgaccctctagttatcaaaatgttatccatacccaaagttaaatagaaatatccctttttctacacaaatctcccttactcctcccttgttactcaccgatcactagtgatctttctcattcgccttagtctgttctggctgctagattaagtactatagtcctggtggtggataagcaagagaaatgtgtttctcaccgttccagaggttagtaagtctgaagtcaagatgaaggtggtttaaccattggagtttctgcttctctgtagttacttcattcacatttatgaggtctgagtgcaaagggtctcttaaatctctttttcaaattcactaatgcattcctgagggccccaactcttcttacatgggagctgttaaagagaggattcacaaactgaaaaggataaaatagttatgaaaattcattgctgtttgtgtaccagtttgacatgttaaaaaggcttgcatacttatcatctctggtgattttcaaggaaccttgagatggagagaatacctttgttgtttgatactttttggtttccagttttgtttgtttgtttataagacagagttgtcactatataacccttggctgtcttggaactcattatgtaggctaagctaacttcaaactcagagatccaagtgcttctgcctccctaggctgaggattaaaagtgtgttctacgagggttgctttctgtcttccaggagaaagatatgggtccaaggagattagaagtgctgtccctgagtcttcacagccactgatagtagatctggaatttgaagttacatctaatttaacacccagaattctttccacaacagctgccattgtggtttagattccaagtgtgtattagtgccgagtgactcatgcagtaatacaaaccagtttcattttagagtagagattcaaagctcaatttccccagtaggttctcccaaattctctgagcaagtgtaatatgcactttggggaatgtgcctgtttccataaccatctaacaccatgatgaacacacaacaatcttctactataatacaaacattgtttgcagccatgtctaccaacacttgatgcacctgtgcctccatttctctccacaaatacttggccctcaacctgcccccctgccagtgtgtaaagctccactacctctgactaaagctgagccccataaaatgcaggaacgagtaatactcgcaggagacagcctgtgttccccactgttctatttccttcctctttccgatattctcccagtctgcgtgtgtggattcccaggctttcctcttcattctcctccagagacctcagcatgtcttcctcattgatgcccttcagcctcctagtggcttaaagtgtcctacacagtgattccatctccagagaatgtgcttgcaggaacatcctacggtaacagtcacttcattctttacagggccttggaaccattggttttactggcaatgagctctactaaagggctgagcaagaagagagctgggagcttgaagtggaacattggtctcttgtggaatgcatttactgaaaagttgctgttggcttacttttttttctgggtggttagcatatggcattatttctctaatttttctagctctcactctcactaaacttgctttgtacagcagggagaggttccaaagatgaattcagatttggaagatttccatgacaattgcattgatctgctaaaggggccagggaaggatgaccagaaaacattcagtgaagaaaggaatgaggtaatgaaagtatttagcttcaaccttctgttattttgtctttgagatttgtatatctatatcaactctgtctcacccatcaaatcaagtttttgaatataaactcactgtgagtttcctcatcccggccatgctagctacccttacttggtcattctctctcaggtttctctctgggtcccctctactgaatcctagagcgataagcatctcacagacacattagcttaggctagctctactctcccatctcttgcctaatgacctttgcatcaatcttatttcattttatttgaaaacctgttagagcattaccaaaggggaagcttttaaaattgttttacatgaaccatgaggaaatattagtacataaaaccaggctccatgtttttcctctagactcttaacaccacatgatatttctaagcatctgtactaaggtaccgaatccagctaaagtataaatactacttaaacaaatgtttaaaccttgtatcatatacatgtaaattaaagcagctaacaaggggatggcaaatactcatgaatacaaaggctttcaaaggtctcgtttaagtggccacacccttccaggctttcctatggataagaggctctatttgtagctgctgtattacagttaggcttgatttcttttctttgtcaatgtgcctgtttctagttttattctcctggatgaaaagcagaccaaacatgtttcccagcagcccccaaattaacaaaatatacttctatgataaaagagttaaacacacacacacacacacacacacacacacacacacacacaatttgtaagttatttcatgaaccaagatttcttttcttgtagtgagtacaattcttctagattctttatacgtctttttttttcccagattgaatctgtgtcaaagtccagtgcaatcgtacagctcctagccagcattaataccatgaagcaggctactttttgagtggtacaatttggagccttttacacctgggtctcctctaagtacaaaaaatgctggctagccttagtcatctgtctgacttcaatctcctatcaaatggttgttagttattcttatccaagtcagggtttcttacctgcaacactcctggcattttacccagagaaagaacttctctggagggagtgaagatcttatgtactgtaaaatctgtaacagccttgtgccccttctgtgagccctcctgttacttagcctgtctgggtatgtggattgtggcatgattatcctttactttacagctaatatccatgtatgagtatataccatgtttgtctttctgggtctgggttaccttactcaggataatatttttctagttccatccatttgcctgcaagttttatgatgtcattgtctttaacagctgagcaatgatgtcattgttcttaacagctgagcaacatgcaacatccccttgctatttcctgactgatgttcatagcactgctgtctgcctaacctggactaggaaaacaaatgtcaatgggaatagccaatatcctactggagagcaatatcatcccttatacatgtgcaaagacaaccacttaacatgataaagaataaatacaccacattttaaaatctatgattttaaatacttttgatttgttacaatattattattttagttctataaattttcctatatcatgtgttagatgcatttaataaagactcagaaacaaaaggcattgctgctaaagcaaccacactcaccttttataccttgtaaagggggtttttaatcttccttttatctatttttattaaaagaaacagatgcctttaaataaaacagatgcaacttattctcattgacaggtgacttttattttaaaataaattaaaagacacactagatcatcagtcgtttacaatcaagtgaaggccccaattacagctgtcaagagttctgactggcatcatttcctaccctgtctactgtcgttggtacagacagcataatgaatgggcagcagtgcgcttcattttcaagcagctcaatcacacttatgcgcttattgtctctcctatttacatagaggtcagatgtaatgattctccaaagcccccaaagggcaaattagaggaaagtcccaggtagaaacctgggatcacactgaactcagtcctgatacccttaaatgctgtgagtcttcctcaggaaaaaaaaaacaaaaaacaaaaacaaaacaacaacaacaaaaaaaccagttctacggaatgattataaaaagatatttacgacaggaagtttcttctgagacagtgaagtccttttcatgtctcctgactcctggaagggtagaaggcgttaaacaatcgcaccaatgtaatgcacatagcattgtcaacaggttactgctggcgttttatccctaggctgggtgctgaagctgaagccacagcaatatctgaaaactcccaaggttaaatggcagcacagagtattaaaggacttgcctaaagccatgggaccatttggtagctgatgagagatttggatgctagcactgagaggtgctaggagggattggactcgtctgatctaatctcatgttagaattgaagaaactcagacaaaggggcattaaatagtttcccctccagaatgacagaaactaataccagaggtcagcaggtagcctggtccttttggatttcagtaaaatacctcttccaggaggaccaagaggttctcccaggactgcgccataagcatgagctgtttgtagcgataccgtgggtgccaggctgacccttcccttctgtcttgcctgctgtgtgcaggaggattaataggcaacagaacgaaagtgcctctctttgagagagttcagtggagagtgcttatcagggtgggaggatagcccctggttcttcccatcaggtcatggaatgggtgttagactttacagagactgatgccttgggagactaagaagagtaaaggctctcttcccctttctgttccctttctttaccatgttatacaagggtcctaaggtctctggtccccatttgtctgtccgtgagccctccgtgggcctttgtacagaaagtcccctgcctagtatttctatttacttcccactaatctgaggaatcttctttatcctaaagaaagaacacctaatgtagagatatttggggatgcaaagggtctggtattcctttagatgtgtggtgtgcacgtctccctatgcaatggattttgaggattgattctgctcagttaggtcaatgggtctacaatatgattcctttccagaactgaccctacgcaaaggcagtgattataaacctgtggaaatcaaagtgcaccagtcatgcgagacataagaaccagggcagaggtgtataatgagttaaaaggcactgtatcattaggtatataaatggccagggatgttagaggaagggtatacatagaagattaaaaggccaagagtgggagctggggaagagcttcagtcaggaaagtacttgccacccacagggggacccggttcaggctcccaataccctgtaaaaagctcggtcccactgtgtgcctgtaaaagcagttctaaggagatggagacaggaggctcactaaagcccaatggtgacacaagtccaagtgaattggtagcctgcaagtatcaaataaaactacaacagtaacaatggaggaagatagccagtgtggatgcctggcacccacacacatatgcacatcagtgagtacacacacatatgtaaacgtatacatatcacatacctagcagaaaaacaaaaacaacaaaaaaaaaaaaaaacaaaagctaactatacctgttgagatggtgtgggaagagaatcaggatgaaaacagagagcagagaaagatgtacgagaaacaaatttagaacagggtcatggtcagcaaatcagagcggaatttcccaactgatttcccagaactcgtcgggaaagatgcaagtgtcttatagaaacgatgattccatgctgggaaaattagaaacgatagtcgctacctgtgaaggcttacatactttattcataagtgaaaagtgtagacatttggcaaactatacctcattgagcttcaaaagtagtgattgtaacattttaaaatgacttggaggactgtctgcccatttccatgtagagaacaaagcagaaaggaccaagagccaaatgaatgtggtcagaaaaaatatttacataaaatgtaccttagttgcttgctgaaatgactgctctgtgggtaactcttggttagtgtcaaaggcatgattaactatgctttcagaaaatcacttatttgataaacacacttgtagtgccccctccttagataactgagcagaagtaggagctgaataagaatttggtcgggagagaattttacctatggctcttaagtagtatttcagttcacttgagggcgctttgaatatttttggtcatggtcatggagagtgcccaatacacatctggagttcagggactctgccaccatctccctgaggcttaccttaggttttcatctcacgctgggcatcgttttaatgggagggaggctggggaaagcagtgtatccacctaatgtaaccgtggctttcctcctttgaaggggcaggtgcagggagcagatgtattggccgtcaatggaacaagagaagatgggcttcccatggacttgaggcggacctcctctgacaaagaggacagcgcccagggtctgatccttccagaagacacactatctggagaagaatctgagtgtatctcatccgatgacatctctttgcctccactgccagtgagccccgagtcccctctggcaccatcagacatggaggtagaagaacttaccagctcctctgccctcgccctgcacatcagcggctacaggatgcatccagggacaggtggtctaggaaaggcccaggagtctgctcttccctcacccattgcctttgcggatgggggccatagtaagaaagacacatttacaagtcattttgagaggccctatccacagttgaaagctgaatcctcattagcctccagaggatcagcagagatgagtaccaagttgcacatcaatgtgaaatgtccagcgagcatgccccatgaagtgcacgacaaagctttacagcaatgctcccaggctcgggagagcacactagaaatgcaggaaaaagtgcatgctgattctaacgtcactaaaacccaagacaggctgcatgctgcccttgatgtgtcccctggcctcggctctcaaccagacaccagcgagagccatcagaggcgagtgggtccccaaggaaacaagaaaaactcatccgcagaaaacagcgtggtcagcctagctggccaggcacctcatttctccaggctgctgtccaatgtaactgtcatggaaggttccccagtgactttggaagtcgaagtaacaggattcccagagcctacactgacatggtgggtagcctataatgacaagccatagacagaaataactgctgagagtatctcattttgtgtggactaacctagaggttcagggctggctgactaaccctcaggacactcaaccctgcatgctttggtctcaccgtacacctccactttcatttaactaaaagctttgtaatgccgtgggggtggggagtaaccatctaacataatgattaacaccacacacacacacacacacacacacacacacacacacacacacacacacaccgctccagaagccctggaagttgattctgcttggttttctttccatttaacattcctcattttaaataatcaggtcttgaaatgccaaccctattgtctgcttctatattggaatggcattgtcttagcttgacacccttcagggacttaaaaagcctaagataccatagatttttttttcttccccttttcactcatttcatcttctcgacagaaccgcgggcacctttgtgatatttgttttgctaagggtccttttaaaaaatacctttgggagcgacgcacgcctttaatcctagcacttgagaggcagaggcaggtggatttctgagttcgaggccagcctggtctacagagtgagttccaggacagccagggctacacagagaaaccctgtctcgaaaaccttcggtataaaatatggaaatacttttatagctgctccaggtgcctgataataagcttatttttggaaagtgatgtaatacctgagccgtgaacagtgtgacctcactctagagacatggttgcctttgtaaaagtaaaccataaagccaaaggctctgaaccacttgctgtgaatagcaaagttgttctagacttttccatgggacttacttctaaaccttcacaaaattctcatcctgaggcaaactcacatgaaagcacactaaggagggttggtgagtttatactgacaggctaatatttatcagaaattttctgtaagatttgttttgtttttgcatgtctcattgatggtacttgacttgtgaagcaggtatctaaagaatttaggagaaaattttggcactcaaatagtacaagaatctgtacttgtgtaagtgcagaaattagcacttttttgttttgttatttttgcaattgcatggttttttttttacaaataaaaacttttgtatttatgaattcaacagttatttatttcataattaaatactagttcacccc

SEQ ID NO: 410 - DNA, 5523 bp, Mus Musculus
cctgttctttccttttggccgggcaatcagtgtgaacagaggcgcgttccctgaaagagtcccggtagcctcgtggaagccttctgacatgaccagcagacagcatcactaccaaggctgctcggggtttaagccctgcttctaaagtgccatgtcctgcaaagaaagtccccatgtgggtgcttccaccaccactgtcagctctgtagccgtgcacgctggggactccaagatcgtgatcgccgttgtcaagtgtggcaaatgggtacgactccaactggctgaatcgcagcccaatctcctcgaaattgggagcagtcaagatgaaaccaaaaaactccttcacgatcatgagctgcttctggccaagcttaaggccttggaagatcgtgtgtgggaactcttacgggaagcagaccggacagctgaagcaaacaaggctcaaagtcaggtgtatgacgccatggcccagacgctgggtgaggcatgggcaaccctggtctccatgcttgaaagaagaagggagctccttgggctgacgtccgagttctttcaaagtgctttggagtttgctataaaaatagaccaagctgaagcttttctgcagaatcctcatgagtttgagagcactgaagccttacagtcacttcttctgcttcatgaccgacatgccaaagaactcttagaaagatccctagaccttttaaacaaaagtcaacaactgactgacttcatagaaaaattcaagtgtgaaggatctactatgaattctgagctgatccagggagctcagagcagctgtctgaagatcgacagcctccttgaacttctgcaagacaggagaaggcagctcgacaagtacttgcagcaacagcggcaggaattgtctcaggttctgcagttgtgtctgtgggaccaacaagaaaaccaggtttcttcttggtttcagaaagcaataagagatctgcaggaacagagtctgggcgcatcactttcagacaacagagagctaatctgcaagcacgaggacctgatagtcaaagcaaagtcatttgatgtacttgggaaagttgaagcttaccttaagctccttaaatcagagggtttaagcctgcctgtcttggcagcgaagcatgaggaattacacagagaaattaaagactctacagccactgctctgcaaaagggacgaaccttaatcagccaagtagactcctgccgctctcgggtgacaggaatccacgagatgatgggatacattcagaaccgagtggattgtctcactgaacagtgtacagcgcatgaggaatttgcccgcaagagacagcaattagcaacatcagtggacgactacctaaggaaggtggaaatgtcaattcaggaaatcaggcccattcttgctaccacattggatgttgcttccagcccttctgaatcagagaagattttaaataaatatctggaattggatatccaagtcaaggagacagcacatgcattagaagcagctgcaaaaatcatgacagagaaaaatgaacttgaactcaatgaagtggcattgcttcctcttaaagtgaaatggctagaggaagaattaagcacgcttggtcgaagcatcagctgcaggtcacggatcctgcagacgtacgtggcatttcgaaagtcatccgaggaggcagaggagcagcttcagagcctaaaggaattttatctgactgaaattccttggaaagatgaagacgatgctgtggtcaagtgccagtctaactccgctgagaggaaatggcagctgtttttaaagaagagttttttgacccaggacttgagcctcgagtttctgaacttaataaacatggcaaaagagaatgagatattaaatgttaaaaatgaaatgcacattatggagaacattatggaaaagcaaacaaatggaagggaagagctcagccatctccgagtggcgtggtacctcaaagctatcgaaggcaagcctgcgagagagcagtgggaaatgttcaaagagaaacttacaaagactactcacagtgtaaaacttctccacgaagttctcatgcctgtctctgcgcttgaccttggggggagcctccagagcacgtcagatctgcggaggaggtggatcgcaatgaagcctcagctccagcaactgcatgaggatgttcagcaaatcacgaaagagtgggaagtgttaagcagtcagggagctcctctgaaggagaaggctgaacagctgaaggaccttgtccatctccaccggaggcagcgagagcgaatccaggaatatgaggaaatcctatacaagacagtccagttccaccaggtcaaggaagagctggtccatctcatcaaaccaagagaactggaacttctagcacagcccatggaactggcaagttctgaggaggtccagatgcaactgggccgttcgcaagaaaggcgggcacatgtagaccatctccatcagctggccctgaccttaggagtggacatcatttcatccgtgcaacaacctaattgctctaatatttctgcaaagaacctgcagcagcagctggaggcccttgaactggagagcaggagttggagtgcccaagccaaagaacatgagcgcgtcctgtcctgcagcttggagtactgcactgcacgtgatgagatcagtgagctcaaagagtcattcaaagacataaaaaagaaattcaacaatctgaagtttaattactccaagaaaaatgagaaatctcgaaatttaaagactcttcagtatcaaatccaacaagtggatacatatgctgaaaaaattcaggctctaaggaagaaaatggaaaaagttaataataagacatctgattcattcttaagttatccaagtaataaagctaacatgctttcggaagccatggaggatttgaaaaagaacgtggatgactttgacaaagttgtgacagattacaaaatgaatttggacctgactgagcatcttcaggaagtaatagaagagtgtaacttttggtatgaagatgcaagtgccaccgttgtgagagttgggaagtattccatggagtgccaaacaagggaagctgtggacatcctccacaggcagttcaataagtttattactccctcggtgccccagcaagaagaaaggattcaggaggtcattgaccttgctcagcgcttatatggtttggaagaggggcagaaatatgcagagaagattgtcacaagacacaaggagattcttgaatctattactgaattatgtgggtctctcgtggaacttaaagaaaaactgatgcagggagaggttccaaagatgaattcagatttggaagatttccatgacaattgcattgatctgctaaaggggccagggaaggatgaccagaaaacattcagtgaagaaaggaatgaggggcaggtgcagggagcagatgtattggccgtcaatggaacaagagaagatgggcttcccatggacttgaggcggacctcctctgacaaagaggacagcgcccagggtctgatccttccagaagacacactatctggagaagaatctgagtgtatctcatccgatgacatctctttgcctccactgccagtgagccccgagtcccctctggcaccatcagacatggaggtagaagaacttaccagctcctctgccctcgccctgcacatcagcggctacaggatgcatccagggacaggtggtctaggaaaggcccaggagtctgctcttccctcacccattgcctttgcggatgggggccatagtaagaaagacacatttacaagtcattttgagaggccctatccacagttgaaagctgaatcctcattagcctccagaggatcagcagagatgagtaccaagttgcacatcaatgtgaaatgtccagcgagcatgccccatgaagtgcacgacaaagctttacagcaatgctcccaggctcgggagagcacactagaaatgcaggaaaaagtgcatgctgattctaacgtcactaaaacccaagacaggctgcatgctgcccttgatgtgtcccctggcctcggctctcaaccagacaccagcgagagccatcagaggcgagtgggtccccaaggaaacaagaaaaactcatccgcagaaaacagcgtggtcagcctagctggccaggcacctcatttctccaggctgctgtccaatgtaactgtcatggaaggttccccagtgactttggaagtcgaagtaacaggattcccagagcctacactgacatggtgggtagcctataatgacaagccatagacagaaataactgctgagagtatctcattttgtgtggactaacctagaggttcagggctggctgactaaccctcaggacactcaaccctgcatgctttggtctcaccgtacacctccactttcatttaactaaaagctttgtaatgccgtgggggtggggagtaaccatctaacataatgattaacaccacacacacacacacacacacacacacacacacacacacacacacacacaccgctccagaagccctggaagttgattctgcttggttttctttccatttaacattcctcattttaaataatcaggtcttgaaatgccaaccctattgtctgcttctatattggaatggcattgtcttagcttgacacccttcagggacttaaaaagcctaagataccatagatttttttttcttccccttttcactcatttcatcttctcgacagaaccgcgggcacctttgtgatatttgttttgctaagggtccttttaaaaaatacctttgggagcgacgcacgcctttaatcctagcacttgagaggcagaggcaggtggatttctgagttcgaggccagcctggtctacagagtgagttccaggacagccagggctacacagagaaaccctgtctcgaaaaccttcggtataaaatatggaaatacttttatagctgctccaggtgcctgataataagcttatttttggaaagtgatgtaatacctgagccgtgaacagtgtgacctcactctagagacatggttgcctttgtaaaagtaaaccataaagccaaaggctctgaaccacttgctgtgaatagcaaagttgttctagacttttccatgggacttacttctaaaccttcacaaaattctcatcctgaggcaaactcacatgaaagcacactaaggagggttggtgagtttatactgacaggctaatatttatcagaaattttctgtaagatttgttttgtttttgcatgtctcattgatggtacttgacttgtgaagcaggtatctaaagaatttaggagaaaattttggcactcaaatagtacaagaatctgtacttgtgtaagtgcagaaattagcacttttttgttttgttatttttgcaattgcatggttttttttttacaaataaaaacttttgtatttatgaattcaacagttatttatttcataattaaatactagttcacccc

SEQ ID NO: 411 - protein, 1386 aa, Mus Musculus
MSCKESPHVGASTTTVSSVAVHAGDSKIVIAVVKCGKWVRLQLAESQPNLLEIGSSQDETKKLLHDHELLLAKLKALEDRVWELLREADRTAEANKAQSQVYDAMAQTLGEAWATLVSMLERRRELLGLTSEFFQSALEFAIKIDQAEAFLQNPHEFESTEALQSLLLLHDRHAKELLERSLDLLNKSQQLTDFIEKFKCEGSTMNSELIQGAQSSCLKIDSLLELLQDRRRQLDKYLQQQRQELSQVLQLCLWDQQENQVSSWFQKAIRDLQEQSLGASLSDNRELICKHEDLIVKAKSFDVLGKVEAYLKLLKSEGLSLPVLAAKHEELHREIKDSTATALQKGRTLISQVDSCRSRVTGIHEMMGYIQNRVDCLTEQCTAHEEFARKRQQLATSVDDYLRKVEMSIQEIRPILATTLDVASSPSESEKILNKYLELDIQVKETAHALEAAAKIMTEKNELELNEVALLPLKVKWLEEELSTLGRSISCRSRILQTYVAFRKSSEEAEEQLQSLKEFYLTEIPWKDEDDAVVKCQSNSAERKWQLFLKKSFLTQDLSLEFLNLINMAKENEILNVKNEMHIMENIMEKQTNGREELSHLRVAWYLKAIEGKPAREQWEMFKEKLTKTTHSVKLLHEVLMPVSALDLGGSLQSTSDLRRRWIAMKPQLQQLHEDVQQITKEWEVLSSQGAPLKEKAEQLKDLVHLHRRQRERIQEYEEILYKTVQFHQVKEELVHLIKPRELELLAQPMELASSEEVQMQLGRSQERRAHVDHLHQLALTLGVDIISSVQQPNCSNISAKNLQQQLEALELESRSWSAQAKEHERVLSCSLEYCTARDEISELKESFKDIKKKFNNLKFNYSKKNEKSRNLKTLQYQIQQVDTYAEKIQALRKKMEKVNNKTSDSFLSYPSNKANMLSEAMEDLKKNVDDFDKVVTDYKMNLDLTEHLQEVIEECNFWYEDASATVVRVGKYSMECQTREAVDILHRQFNKFITPSVPQQEERIQEVIDLAQRLYGLEEGQKYAEKIVTRHKEILESITELCGSLVELKEKLMQGEVPKMNSDLEDFHDNCIDLLKGPGKDDQKTFSEERNEGQVQGADVLAVNGTREDGLPMDLRRTSSDKEDSAQGLILPEDTLSGEESECISSDDISLPPLPVSPESPLAPSDMEVEELTSSSALALHISGYRMHPGTGGLGKAQESALPSPIAFADGGHSKKDTFTSHFERPYPQLKAESSLASRGSAEMSTKLHINVKCPASMPHEVHDKALQQCSQARESTLEMQEKVHADSNVTKTQDRLHAALDVSPGLGSQPDTSESHQRRVGPQGNKKNSSAENSVVSLAGQAPHFSRLLSNVTVMEGSPVTLEVEVTGFPEPTLTWWVAYNDKP

SEQ ID NO: 412 - DNA, 5512 bp, Mus Musculus
gccgggcaatcagtgtgaacagaggcgcgttccctgaaagagtcccggtagcctcgtggaagccttctgacatgaccagcagacagcatcactaccaaggctgctcggggtttaagccctgcttctaaagtgccatgtcctgcaaagaaagtccccatgtgggtgcttccaccaccactgtcagctctgtagccgtgcacgctggggactccaagatcgtgatcgccgttgtcaagtgtggcaaatgggtacgactccaactggctgaatcgcagcccaatctcctcgaaattgggagcagtcaagatgaaaccaaaaaactccttcacgatcatgagctgcttctggccaagcttaaggccttggaagatcgtgtgtgggaactcttacgggaagcagaccggacagctgaagcaaacaaggctcaaagtcaggtgtatgacgccatggcccagacgctgggtgaggcatgggcaaccctggtctccatgcttgaaagaagaagggagctccttgggctgacgtccgagttctttcaaagtgctttggagtttgctataaaaatagaccaagctgaagcttttctgcagaatcctcatgagtttgagagcactgaagccttacagtcacttcttctgcttcatgaccgacatgccaaagaactcttagaaagatccctagaccttttaaacaaaagtcaacaactgactgacttcatagaaaaattcaagtgtgaaggatctactatgaattctgagctgatccagggagctcagagcagctgtctgaagatcgacagcctccttgaacttctgcaagacaggagaaggcagctcgacaagtacttgcagcaacagcggcaggaattgtctcaggttctgcagttgtgtctgtgggaccaacaagaaaaccaggtttcttcttggtttcagaaagcaataagagatctgcaggaacagagtctgggcgcatcactttcagacaacagagagctaatctgcaagcacgaggacctgatagtcaaagcaaaggaatgggattcggccgtagagaagctgaaaagccaggctttggggattctattgtccaaggacttggcaggaaaggaacatctacagctctctaaccagaaactgaatcggcttcaagaagaatttggaagactcatggtggaaaggaaagcctggttatcgatggcaaatgacttttttaccagtgctaacaagtcatttgatgtacttgggaaagttgaagcttaccttaagctccttaaatcagagggtttaagcctgcctgtcttggcagcgaagcatgaggaattacacagagaaattaaagactctacagccactgctctgcaaaagggacgaaccttaatcagccaagtagactcctgccgctctcgggtgacaggaatccacgagatgatgggatacattcagaaccgagtggattgtctcactgaacagtgtacagcgcatgaggaatttgcccgcaagagacagcaattagcaacatcagtggacgactacctaaggaaggtggaaatgtcaattcaggaaatcaggcccattcttgctaccacattggatgttgcttccagcccttctgaatcagagaagattttaaataaatatctggaattggatatccaagtcaaggagacagcacatgcattagaagcagctgcaaaaatcatgacagagaaaaatgaacttgaactcaatgaagtggcattgcttcctcttaaagtgaaatggctagaggaagaattaagcacgcttggtcgaagcatcagctgcaggtcacggatcctgcagacgtacgtggcatttcgaaagtcatccgaggaggcagaggagcagcttcagagcctaaaggaattttatctgactgaaattccttggaaagatgaagacgatgctgtggtcaagtgccagtctaactccgctgagaggaaatggcagctgtttttaaagaagagttttttgacccaggacttgagcctcgagtttctgaacttaataaacatggcaaaagagaatgagatattaaatgttaaaaatgaaatgcacattatggagaacattatggaaaagcaaacaaatggaagggaagagctcagccatctccgagtggcgtggtacctcaaagctatcgaaggcaagcctgcgagagagcagtgggaaatgttcaaagagaaacttacaaagactactcacagtgtaaaacttctccacgaagttctcatgcctgtctctgcgcttgaccttggggggagcctccagagcacgtcagatctgcggaggaggtggatcgcaatgaagcctcagctccagctggtccatctcatcaaaccaagagaactggaacttctagcacagcccatggaactggcaagttctgaggaggtccagatgcaactgggccgttcgcaagaaaggcgggcacatgtagaccatctccatcagctggccctgaccttaggagtggacatcatttcatccgtgcaacaacctaattgctctaatatttctgcaaagaacctgcagcagcagctggaggcccttgaactggagagcaggagttggagtgcccaagccaaagaacatgagcgcgtcctgtcctgcagcttggagtactgcactgcacgtgatgagatcagtgagctcaaagagtcattcaaagacataaaaaagaaattcaacaatctgaagtttaattactccaagaaaaatgagaaatctcgaaatttaaagactcttcagtatcaaatccaacaagtggatacatatgctgaaaaaattcaggctctaaggaagaaaatggaaaaagttaataataagacatctgattcattcttaagttatccaagtaataaagctaacatgctttcggaagccatggaggatttgaaaaagaacgtggatgactttgacaaagttgtgacagattacaaaatgaatttggacctgactgagcatcttcaggaagtaatagaagagtgtaacttttggtatgaagatgcaagtgccaccgttgtgagagttgggaagtattccatggagtgccaaacaagggaagctgtggacatcctccacaggcagttcaataagtttattactccctcggtgccccagcaagaagaaaggattcaggaggtcattgaccttgctcagcgcttatatggtttggaagaggggcagaaatatgcagagaagattgtcacaagacacaaggagattcttgaatctattactgaattatgtgggtctctcgtggaacttaaagaaaaactgatgcagggagaggttccaaagatgaattcagatttggaagatttccatgacaattgcattgatctgctaaaggggccagggaaggatgaccagaaaacattcagtgaagaaaggaatgaggggcaggtgcagggagcagatgtattggccgtcaatggaacaagagaagatgggcttcccatggacttgaggcggacctcctctgacaaagaggacagcgcccagggtctgatccttccagaagacacactatctggagaagaatctgagtgtatctcatccgatgacatctctttgcctccactgccagtgagccccgagtcccctctggcaccatcagacatggaggtagaagaacttaccagctcctctgccctcgccctgcacatcagcggctacaggatgcatccagggacaggtggtctaggaaaggcccaggagtctgctcttccctcacccattgcctttgcggatgggggccatagtaagaaagacacatttacaagtcattttgagaggccctatccacagttgaaagctgaatcctcattagcctccagaggatcagcagagatgagtaccaagttgcacatcaatgtgaaatgtccagcgagcatgccccatgaagtgcacgacaaagctttacagcaatgctcccaggctcgggagagcacactagaaatgcaggaaaaagtgcatgctgattctaacgtcactaaaacccaagacaggctgcatgctgcccttgatgtgtcccctggcctcggctctcaaccagacaccagcgagagccatcagaggcgagtgggtccccaaggaaacaagaaaaactcatccgcagaaaacagcgtggtcagcctagctggccaggcacctcatttctccaggctgctgtccaatgtaactgtcatggaaggttccccagtgactttggaagtcgaagtaacaggattcccagagcctacactgacatggtgggtagcctataatgacaagccatagacagaaataactgctgagagtatctcattttgtgtggactaacctagaggttcagggctggctgactaaccctcaggacactcaaccctgcatgctttggtctcaccgtacacctccactttcatttaactaaaagctttgtaatgccgtgggggtggggagtaaccatctaacataatgattaacaccacacacacacacacacacacacacacacacacacacacacacacacacaccgctccagaagccctggaagttgattctgcttggttttctttccatttaacattcctcattttaaataatcaggtcttgaaatgccaaccctattgtctgcttctatattggaatggcattgtcttagcttgacacccttcagggacttaaaaagcctaagataccatagatttttttttcttccccttttcactcatttcatcttctcgacagaaccgcgggcacctttgtgatatttgttttgctaagggtccttttaaaaaatacctttgggagcgacgcacgcctttaatcctagcacttgagaggcagaggcaggtggatttctgagttcgaggccagcctggtctacagagtgagttccaggacagccagggctacacagagaaaccctgtctcgaaaaccttcggtataaaatatggaaatacttttatagctgctccaggtgcctgataataagcttatttttggaaagtgatgtaatacctgagccgtgaacagtgtgacctcactctagagacatggttgcctttgtaaaagtaaaccataaagccaaaggctctgaaccacttgctgtgaatagcaaagttgttctagacttttccatgggacttacttctaaaccttcacaaaattctcatcctgaggcaaactcacatgaaagcacactaaggagggttggtgagtttatactgacaggctaatatttatcagaaattttctgtaagatttgttttgtttttgcatgtctcattgatggtacttgacttgtgaagcaggtatctaaagaatttaggagaaaattttggcactcaaatagtacaagaatctgtacttgtgtaagtgcagaaattagcacttttttgttttgttatttttgcaattgcatggttttttttttacaaataaaaacttttgtatttatgaattcaacagttatttatttcataattaaatactagttcacccc

SEQ ID NO: 413 - protein, 1388 aa, Mus Musculus
MSCKESPHVGASTTTVSSVAVHAGDSKIVIAVVKCGKWVRLQLAESQPNLLEIGSSQDETKKLLHDHELLLAKLKALEDRVWELLREADRTAEANKAQSQVYDAMAQTLGEAWATLVSMLERRRELLGLTSEFFQSALEFAIKIDQAEAFLQNPHEFESTEALQSLLLLHDRHAKELLERSLDLLNKSQQLTDFIEKFKCEGSTMNSELIQGAQSSCLKIDSLLELLQDRRRQLDKYLQQQRQELSQVLQLCLWDQQENQVSSWFQKAIRDLQEQSLGASLSDNRELICKHEDLIVKAKEWDSAVEKLKSQALGILLSKDLAGKEHLQLSNQKLNRLQEEFGRLMVERKAWLSMANDFFTSANKSFDVLGKVEAYLKLLKSEGLSLPVLAAKHEELHREIKDSTATALQKGRTLISQVDSCRSRVTGIHEMMGYIQNRVDCLTEQCTAHEEFARKRQQLATSVDDYLRKVEMSIQEIRPILATTLDVASSPSESEKILNKYLELDIQVKETAHALEAAAKIMTEKNELELNEVALLPLKVKWLEEELSTLGRSISCRSRILQTYVAFRKSSEEAEEQLQSLKEFYLTEIPWKDEDDAVVKCQSNSAERKWQLFLKKSFLTQDLSLEFLNLINMAKENEILNVKNEMHIMENIMEKQTNGREELSHLRVAWYLKAIEGKPAREQWEMFKEKLTKTTHSVKLLHEVLMPVSALDLGGSLQSTSDLRRRWIAMKPQLQLVHLIKPRELELLAQPMELASSEEVQMQLGRSQERRAHVDHLHQLALTLGVDIISSVQQPNCSNISAKNLQQQLEALELESRSWSAQAKEHERVLSCSLEYCTARDEISELKESFKDIKKKFNNLKFNYSKKNEKSRNLKTLQYQIQQVDTYAEKIQALRKKMEKVNNKTSDSFLSYPSNKANMLSEAMEDLKKNVDDFDKVVTDYKMNLDLTEHLQEVIEECNFWYEDASATVVRVGKYSMECQTREAVDILHRQFNKFITPSVPQQEERIQEVIDLAQRLYGLEEGQKYAEKIVTRHKEILESITELCGSLVELKEKLMQGEVPKMNSDLEDFHDNCIDLLKGPGKDDQKTFSEERNEGQVQGADVLAVNGTREDGLPMDLRRTSSDKEDSAQGLILPEDTLSGEESECISSDDISLPPLPVSPESPLAPSDMEVEELTSSSALALHISGYRMHPGTGGLGKAQESALPSPIAFADGGHSKKDTFTSHFERPYPQLKAESSLASRGSAEMSTKLHINVKCPASMPHEVHDKALQQCSQARESTLEMQEKVHADSNVTKTQDRLHAALDVSPGLGSQPDTSESHQRRVGPQGNKKNSSAENSVVSLAGQAPHFSRLLSNVTVMEGSPVTLEVEVTGFPEPTLTWWVAYNDKP

SEQ ID NO: 414 - DNA, 5844 bp, Mus Musculus
gaggcgcgttccctgaaagagtcccggtagcctcgtggaagccttctgacatgaccagcagacagcatcactaccaaggctgctcggggtttaagccctgcttctaaagtgccatgtcctgcaaagaaagtccccatgtgggtgcttccaccaccactgtcagctctgtagccgtgcacgctggggactccaagatcgtgatcgccgttgtcaagtgtggcaaatgggtacgactccaactggctgaatcgcagcccaatctcctcgaaattgggagcagtcaagatgaaaccaaaaaactccttcacgatcatgagctgcttctggccaagcttaagctatgtacttaagcatctctctggagtatccagaggaaaacactccccagtttccagtgaaggaaacaatcaagtggaaaaggtttaagtcccagggcttcgagattcctacactgcactgaattatttccaatgagaaagaagacatccaggaaggaaaagaggccttggaagatcgtgtgtgggaactcttacgggaagcagaccggacagctgaagcaaacaaggctcaaagtcaggtgtatgacgccatggcccagacgctgggtgaggcatgggcaaccctggtctccatgcttgaaagaagaagggagctccttgggctgacgtccgagttctttcaaagtgctttggagtttgctataaaaatagaccaagctgaagcttttctgcagaatcctcatgagtttgagagcactgaagccttacagtcacttcttctgcttcatgaccgacatgccaaagaactcttagaaagatccctagaccttttaaacaaaagtcaacaactgactgacttcatagaaaaattcaagtgtgaaggatctactatgaattctgagctgatccagggagctcagagcagctgtctgaagatcgacagcctccttgaacttctgcaagacaggagaaggcagctcgacaagtacttgcagcaacagcggcaggaattgtctcaggttctgcagttgtgtctgtgggaccaacaagaaaaccaggtttcttcttggtttcagaaagcaataagagatctgcaggaacagagtctgggcgcatcactttcagacaacagagagctaatctgcaagcacgaggacctgatagtcaaagcaaaggaatgggattcggccgtagagaagctgaaaagccaggctttggggattctattgtccaaggacttggcaggaaaggaacatctacagctctctaaccagaaactgaatcggcttcaagaagaatttggaagactcatggtggaaaggaaagcctggttatcgatggcaaatgacttttttaccagtgctaacaagtcatttgatgtacttgggaaagttgaagcttaccttaagctccttaaatcagagggtttaagcctgcctgtcttggcagcgaagcatgaggaattacacagagaaattaaagactctacagccactgctctgcaaaagggacgaaccttaatcagccaagtagactcctgccgctctcgggtgacaggaatccacgagatgatgggatacattcagaaccgagtggattgtctcactgaacagtgtacagcgcatgaggaatttgcccgcaagagacagcaattagcaacatcagtggacgactacctaaggaaggtggaaatgtcaattcaggaaatcaggcccattcttgctaccacattggatgttgcttccagcccttctgaatcagagaagattttaaataaatatctggaattggatatccaagtcaaggagacagcacatgcattagaagcagctgcaaaaatcatgacagagaaaaatgaacttgaactcaatgaagtggcattgcttcctcttaaagtgaaatggctagaggaagaattaagcacgcttggtcgaagcatcagctgcaggtcacggatcctgcagacgtacgtggcatttcgaaagtcatccgaggaggcagaggagcagcttcagagcctaaaggaattttatctgactgaaattccttggaaagatgaagacgatgctgtggtcaagtgccagtctaactccgctgagaggaaatggcagctgtttttaaagaagagttttttgacccaggacttgagcctcgagtttctgaacttaataaacatggcaaaagagaatgagatattaaatgttaaaaatgaaatgcacattatggagaacattatggaaaagcaaacaaatggaagggaagagctcagccatctccgagtggcgtggtacctcaaagctatcgaaggcaagcctgcgagagagcagtgggaaatgttcaaagagaaacttacaaagactactcacagtgtaaaacttctccacgaagttctcatgcctgtctctgcgcttgaccttggggggagcctccagagcacgtcagatctgcggaggaggtggatcgcaatgaagcctcagctccagcaactgcatgaggatgttcagcaaatcacgaaagagtgggaagtgttaagcagtcagggagctcctctgaaggagaaggctgaacagctgaaggaccttgtccatctccaccggaggcagcgagagcgaatccaggaatatgaggaaatcctatacaagacagtccagttccaccaggtcaaggaagagctggtccatctcatcaaaccaagagaactggaacttctagcacagcccatggaactggcaagttctgaggaggtccagatgcaactgggccgttcgcaagaaaggcgggcacatgtagaccatctccatcagctggccctgaccttaggagtggacatcatttcatccgtgcaacaacctaattgctctaatatttctgcaaagaacctgcagcagcagctggaggcccttgaactggagagcaggagttggagtgcccaagccaaagaacatgagcgcgtcctgtcctgcagcttggagtactgcactgcacgtgatgagatcagtgagctcaaagagtcattcaaagacataaaaaagaaattcaacaatctgaagtttaattactccaagaaaaatgagaaatctcgaaatttaaagactcttcagtatcaaatccaacaagtggatacatatgctgaaaaaattcaggctctaaggaagaaaatggaaaaagttaataataagacatctgattcattcttaagttatccaagtaataaagctaacatgctttcggaagccatggaggatttgaaaaagaacgtggatgactttgacaaagttgtgacagattacaaaatgaatttggacctgactgagcatcttcaggaagtaatagaagagtgtaacttttggtatgaagatgcaagtgccaccgttgtgagagttgggaagtattccatggagtgccaaacaagggaagctgtggacatcctccacaggcagttcaataagtttattactccctcggtgccccagcaagaagaaaggattcaggaggtcattgaccttgctcagcgcttatatggtttggaagaggggcagaaatatgcagagaagattgtcacaagacacaaggagattcttgaatctattactgaattatgtgggtctctcgtggaacttaaagaaaaactgatgcagggagaggttccaaagatgaattcagatttggaagatttccatgacaattgcattgatctgctaaaggggccagggaaggatgaccagaaaacattcagtgaagaaaggaatgaggggcaggtgcagggagcagatgtattggccgtcaatggaacaagagaagatgggcttcccatggacttgaggcggacctcctctgacaaagaggacagcgcccagggtctgatccttccagaagacacactatctggagaagaatctgagtgtatctcatccgatgacatctctttgcctccactgccagtgagccccgagtcccctctggcaccatcagacatggaggtagaagaacttaccagctcctctgccctcgccctgcacatcagcggctacaggatgcatccagggacaggtggtctaggaaaggcccaggagtctgctcttccctcacccattgcctttgcggatgggggccatagtaagaaagacacatttacaagtcattttgagaggccctatccacagttgaaagctgaatcctcattagcctccagaggatcagcagagatgagtaccaagttgcacatcaatgtgaaatgtccagcgagcatgccccatgaagtgcacgacaaagctttacagcaatgctcccaggctcgggagagcacactagaaatgcaggaaaaagtgcatgctgattctaacgtcactaaaacccaagacaggctgcatgctgcccttgatgtgtcccctggcctcggctctcaaccagacaccagcgagagccatcagaggcgagtgggtccccaaggaaacaagaaaaactcatccgcagaaaacagcgtggtcagcctagctggccaggcacctcatttctccaggctgctgtccaatgtaactgtcatggaaggttccccagtgactttggaagtcgaagtaacaggattcccagagcctacactgacatggtgggtagcctataatgacaagccatagacagaaataactgctgagagtatctcattttgtgtggactaacctagaggttcagggctggctgactaaccctcaggacactcaaccctgcatgctttggtctcaccgtacacctccactttcatttaactaaaagctttgtaatgccgtgggggtggggagtaaccatctaacataatgattaacaccacacacacacacacacacacacacacacacacacacacacacacacacaccgctccagaagccctggaagttgattctgcttggttttctttccatttaacattcctcattttaaataatcaggtcttgaaatgccaaccctattgtctgcttctatattggaatggcattgtcttagcttgacacccttcagggacttaaaaagcctaagataccatagatttttttttcttccccttttcactcatttcatcttctcgacagaaccgcgggcacctttgtgatatttgttttgctaagggtccttttaaaaaatacctttgggagcgacgcacgcctttaatcctagcacttgagaggcagaggcaggtggatttctgagttcgaggccagcctggtctacagagtgagttccaggacagccagggctacacagagaaaccctgtctcgaaaaccttcggtataaaatatggaaatacttttatagctgctccaggtgcctgataataagcttatttttggaaagtgatgtaatacctgagccgtgaacagtgtgacctcactctagagacatggttgcctttgtaaaagtaaaccataaagccaaaggctctgaaccacttgctgtgaatagcaaagttgttctagacttttccatgggacttacttctaaaccttcacaaaattctcatcctgaggcaaactcacatgaaagcacactaaggagggttggtgagtttatactgacaggctaatatttatcagaaattttctgtaagatttgttttgtttttgcatgtctcattgatggtacttgacttgtgaagcaggtatctaaagaatttaggagaaaattttggcactcaaatagtacaagaatctgtacttgtgtaagtgcagaaattagcacttttttgttttgttatttttgcaattgcatggttttttttttacaaataaaaacttttgtatttatgaattcaacagttatttatttcataattaaatactagttcacccc

SEQ ID NO: 415 - protein, 1347 aa, Mus Musculus
MAQTLGEAWATLVSMLERRRELLGLTSEFFQSALEFAIKIDQAEAFLQNPHEFESTEALQSLLLLHDRHAKELLERSLDLLNKSQQLTDFIEKFKCEGSTMNSELIQGAQSSCLKIDSLLELLQDRRRQLDKYLQQQRQELSQVLQLCLWDQQENQVSSWFQKAIRDLQEQSLGASLSDNRELICKHEDLIVKAKEWDSAVEKLKSQALGILLSKDLAGKEHLQLSNQKLNRLQEEFGRLMVERKAWLSMANDFFTSANKSFDVLGKVEAYLKLLKSEGLSLPVLAAKHEELHREIKDSTATALQKGRTLISQVDSCRSRVTGIHEMMGYIQNRVDCLTEQCTAHEEFARKRQQLATSVDDYLRKVEMSIQEIRPILATTLDVASSPSESEKILNKYLELDIQVKETAHALEAAAKIMTEKNELELNEVALLPLKVKWLEEELSTLGRSISCRSRILQTYVAFRKSSEEAEEQLQSLKEFYLTEIPWKDEDDAVVKCQSNSAERKWQLFLKKSFLTQDLSLEFLNLINMAKENEILNVKNEMHIMENIMEKQTNGREELSHLRVAWYLKAIEGKPAREQWEMFKEKLTKTTHSVKLLHEVLMPVSALDLGGSLQSTSDLRRRWIAMKPQLQQLHEDVQQITKEWEVLSSQGAPLKEKAEQLKDLVHLHRRQRERIQEYEEILYKTVQFHQVKEELVHLIKPRELELLAQPMELASSEEVQMQLGRSQERRAHVDHLHQLALTLGVDIISSVQQPNCSNISAKNLQQQLEALELESRSWSAQAKEHERVLSCSLEYCTARDEISELKESFKDIKKKFNNLKFNYSKKNEKSRNLKTLQYQIQQVDTYAEKIQALRKKMEKVNNKTSDSFLSYPSNKANMLSEAMEDLKKNVDDFDKVVTDYKMNLDLTEHLQEVIEECNFWYEDASATVVRVGKYSMECQTREAVDILHRQFNKFITPSVPQQEERIQEVIDLAQRLYGLEEGQKYAEKIVTRHKEILESITELCGSLVELKEKLMQGEVPKMNSDLEDFHDNCIDLLKGPGKDDQKTFSEERNEGQVQGADVLAVNGTREDGLPMDLRRTSSDKEDSAQGLILPEDTLSGEESECISSDDISLPPLPVSPESPLAPSDMEVEELTSSSALALHISGYRMHPGTGGLGKAQESALPSPIAFADGGHSKKDTFTSHFERPYPQLKAESSLASRGSAEMSTKLHINVKCPASMPHEVHDKALQQCSQARESTLEMQEKVHADSNVTKTQDRLHAALDVSPGLGSQPDTSESHQRRVGPQGNKKNSSAENSVVSLAGQAPHFSRLLSNVTVMEGSPVTLEVEVTGFPEPTLTWWVAYNDKP

SEQ ID NO: 416 - DNA, 5691 bp, Mus Musculus
cagtgtgaacagaggcgcgttccctgaaagagtcccggtagcctcgtggaagccttctgacatgaccagcagacagcatcactaccaaggctgctcggggtttaagccctgcttctaaagtgccatgtcctgcaaagaaagtccccatgtgggtgcttccaccaccactgtcagctctgtagccgtgcacgctggggactccaagatcgtgatcgccgttgtcaagtgtggcaaatgggtacgactccaactggctgaatcgcagcccaatctcctcgaaattgggagcagtcaagatgaaaccaaaaaactccttcacgatcatgagctgcttctggccaagcttaaggccttggaagatcgtgtgtgggaactcttacgggaagcagaccggacagctgaagcaaacaaggctcaaagtcaggtgtatgacgccatggcccagacgctgggtgaggcatgggcaaccctggtctccatgcttgaaagaagaagggagctccttgggctgacgtccgagttctttcaaagtgctttggagtttgctataaaaatagaccaagctgaagcttttctgcagaatcctcatgagtttgagagcactgaagccttacagtcacttcttctgcttcatgaccgacatgccaaagaactcttagaaagatccctagaccttttaaacaaaagtcaacaactgactgacttcatagaaaaattcaagtgtgaaggatctactatgaattctgagctgatccagggagctcagagcagctgtctgaagatcgacagcctccttgaacttctgcaagacaggagaaggcagctcgacaagtacttgcagcaacagcggcaggaattgtctcaggttctgcagttgtgtctgtgggaccaacaagaaaaccaggtttcttcttggtttcagaaagcaataagagatctgcaggaacagagtctgggcgcatcactttcagacaacagagagctaatctgcaagcacgaggacctgatagtcaaagcaaaggaatgggattcggccgtagagaagctgaaaagccaggctttggggattctattgtccaaggacttggcaggaaaggaacatctacagctctctaaccagaaactgaatcggcttcaagaagaatttggaagactcatggtggaaaggaaagcctggttatcgatggcaaatgacttttttaccagtgctaacaagtcatttgatgtacttgggaaagttgaagcttaccttaagctccttaaatcagagggtttaagcctgcctgtcttggcagcgaagcatgaggaattacacagagaaattaaagactctacagccactgctctgcaaaagggacgaaccttaatcagccaagtagactcctgccgctctcgggtgacaggaatccacgagatgatgggatacattcagaaccgagtggattgtctcactgaacagtgtacagcgcatgaggaatttgcccgcaagagacagcaattagcaacatcagtggacgactacctaaggaaggtggaaatgtcaattcaggaaatcaggcccattcttgctaccacattggatgttgcttccagcccttctgaatcagagaagattttaaataaatatctggaattggatatccaagtcaaggagacagcacatgcattagaagcagctgcaaaaatcatgacagagaaaaatgaacttgaactcaatgaagtggcattgcttcctcttaaagtgaaatggctagaggaagaattaagcacgcttggtcgaagcatcagctgcaggtcacggatcctgcagacgtacgtggcatttcgaaagtcatccgaggaggcagaggagcagcttcagagcctaaaggaattttatctgactgaaattccttggaaagatgaagacgatgctgtggtcaagtgccagtctaactccgctgagaggaaatggcagctgtttttaaagaagagttttttgacccaggacttgagcctcgagtttctgaacttaataaacatggcaaaagagaatgagatattaaatgttaaaaatgaaatgcacattatggagaacattatggaaaagcaaacaaatggaagggaagagctcagccatctccgagtggcgtggtacctcaaagctatcgaaggcaagcctgcgagagagcagtgggaaatgttcaaagagaaacttacaaagactactcacagtgtaaaacttctccacgaagttctcatgcctgtctctgcgcttgaccttggggggagcctccagagcacgtcagatctgcggaggaggtggatcgcaatgaagcctcagctccagcaactgcatgaggatgttcagcaaatcacgaaagagtgggaagtgttaagcagtcagggagctcctctgaaggagaaggctgaacagctgaaggaccttgtccatctccaccggaggcagcgagagcgaatccaggaatatgaggaaatcctatacaagacagtccagttccaccaggtcaaggaagagctggtccatctcatcaaaccaagagaactggaacttctagcacagcccatggaactggcaagttctgaggaggtccagatgcaactgggccgttcgcaagaaaggcgggcacatgtagaccatctccatcagctggccctgaccttaggagtggacatcatttcatccgtgcaacaacctaattgctctaatatttctgcaaagaacctgcagcagcagctggaggcccttgaactggagagcaggagttggagtgcccaagccaaagaacatgagcgcgtcctgtcctgcagcttggagtactgcactgcacgtgatgagatcagtgagctcaaagagtcattcaaagacataaaaaagaaattcaacaatctgaagtttaattactccaagaaaaatgagaaatctcgaaatttaaagactcttcagtatcaaatccaacaagtggatacatatgctgaaaaaattcaggctctaaggaagaaaatggaaaaagttaataataagacatctgattcattcttaagttatccaagtaataaagctaacatgctttcggaagccatggaggatttgaaaaagaacgtggatgactttgacaaagttgtgacagattacaaaatgaatttggacctgactgagcatcttcaggaagtaatagaagagtgtaacttttggtatgaagatgcaagtgccaccgttgtgagagttgggaagtattccatggagtgccaaacaagggaagctgtggacatcctccacaggcagttcaataagtttattactccctcggtgccccagcaagaagaaaggattcaggaggtcattgaccttgctcagcgcttatatggtttggaagaggggcagaaatatgcagagaagattgtcacaagacacaaggagattcttgaatctattactgaattatgtgggtctctcgtggaacttaaagaaaaactgatgcagggagaggttccaaagatgaattcagatttggaagatttccatgacaattgcattgatctgctaaaggggccagggaaggatgaccagaaaacattcagtgaagaaaggaatgaggggcaggtgcagggagcagatgtattggccgtcaatggaacaagagaagatgggcttcccatggacttgaggcggacctcctctgacaaagaggacagcgcccagggtctgatccttccagaagacacactatctggagaagaatctgagtgtatctcatccgatgacatctctttgcctccactgccagtgagccccgagtcccctctggcaccatcagacatggaggtagaagaacttaccagctcctctgccctcgccctgcacatcagcggctacaggatgcatccagggacaggtggtctaggaaaggcccaggagtctgctcttccctcacccattgcctttgcggatgggggccatagtaagaaagacacatttacaagtcattttgagaggccctatccacagttgaaagctgaatcctcattagcctccagaggatcagcagagatgagtaccaagttgcacatcaatgtgaaatgtccagcgagcatgccccatgaagtgcacgacaaagctttacagcaatgctcccaggctcgggagagcacactagaaatgcaggaaaaagtgcatgctgattctaacgtcactaaaacccaagacaggctgcatgctgcccttgatgtgtcccctggcctcggctctcaaccagacaccagcgagagccatcagaggcgagtgggtccccaaggaaacaagaaaaactcatccgcagaaaacagcgtggtcagcctagctggccaggcacctcatttctccaggctgctgtccaatgtaactgtcatggaaggttccccagtgactttggaagtcgaagtaacaggattcccagagcctacactgacatggtgggtagcctataatgacaagccatagacagaaataactgctgagagtatctcattttgtgtggactaacctagaggttcagggctggctgactaaccctcaggacactcaaccctgcatgctttggtctcaccgtacacctccactttcatttaactaaaagctttgtaatgccgtgggggtggggagtaaccatctaacataatgattaacaccacacacacacacacacacacacacacacacacacacacacacacacacaccgctccagaagccctggaagttgattctgcttggttttctttccatttaacattcctcattttaaataatcaggtcttgaaatgccaaccctattgtctgcttctatattggaatggcattgtcttagcttgacacccttcagggacttaaaaagcctaagataccatagatttttttttcttccccttttcactcatttcatcttctcgacagaaccgcgggcacctttgtgatatttgttttgctaagggtccttttaaaaaatacctttgggagcgacgcacgcctttaatcctagcacttgagaggcagaggcaggtggatttctgagttcgaggccagcctggtctacagagtgagttccaggacagccagggctacacagagaaaccctgtctcgaaaaccttcggtataaaatatggaaatacttttatagctgctccaggtgcctgataataagcttatttttggaaagtgatgtaatacctgagccgtgaacagtgtgacctcactctagagacatggttgcctttgtaaaagtaaaccataaagccaaaggctctgaaccacttgctgtgaatagcaaagttgttctagacttttccatgggacttacttctaaaccttcacaaaattctcatcctgaggcaaactcacatgaaagcacactaaggagggttggtgagtttatactgacaggctaatatttatcagaaattttctgtaagatttgttttgtttttgcatgtctcattgatggtacttgacttgtgaagcaggtatctaaagaatttaggagaaaattttggcactcaaatagtacaagaatctgtacttgtgtaagtgcagaaattagcacttttttgttttgttatttttgcaattgcatggttttttttttacaaataaaaacttttgtatttatgaattcaacagttatttatttcataattaaatactagttcacccc

SEQ ID NO: 417 - protein, 1451 aa, Mus Musculus
MSCKESPHVGASTTTVSSVAVHAGDSKIVIAVVKCGKWVRLQLAESQPNLLEIGSSQDETKKLLHDHELLLAKLKALEDRVWELLREADRTAEANKAQSQVYDAMAQTLGEAWATLVSMLERRRELLGLTSEFFQSALEFAIKIDQAEAFLQNPHEFESTEALQSLLLLHDRHAKELLERSLDLLNKSQQLTDFIEKFKCEGSTMNSELIQGAQSSCLKIDSLLELLQDRRRQLDKYLQQQRQELSQVLQLCLWDQQENQVSSWFQKAIRDLQEQSLGASLSDNRELICKHEDLIVKAKEWDSAVEKLKSQALGILLSKDLAGKEHLQLSNQKLNRLQEEFGRLMVERKAWLSMANDFFTSANKSFDVLGKVEAYLKLLKSEGLSLPVLAAKHEELHREIKDSTATALQKGRTLISQVDSCRSRVTGIHEMMGYIQNRVDCLTEQCTAHEEFARKRQQLATSVDDYLRKVEMSIQEIRPILATTLDVASSPSESEKILNKYLELDIQVKETAHALEAAAKIMTEKNELELNEVALLPLKVKWLEEELSTLGRSISCRSRILQTYVAFRKSSEEAEEQLQSLKEFYLTEIPWKDEDDAVVKCQSNSAERKWQLFLKKSFLTQDLSLEFLNLINMAKENEILNVKNEMHIMENIMEKQTNGREELSHLRVAWYLKAIEGKPAREQWEMFKEKLTKTTHSVKLLHEVLMPVSALDLGGSLQSTSDLRRRWIAMKPQLQQLHEDVQQITKEWEVLSSQGAPLKEKAEQLKDLVHLHRRQRERIQEYEEILYKTVQFHQVKEELVHLIKPRELELLAQPMELASSEEVQMQLGRSQERRAHVDHLHQLALTLGVDIISSVQQPNCSNISAKNLQQQLEALELESRSWSAQAKEHERVLSCSLEYCTARDEISELKESFKDIKKKFNNLKFNYSKKNEKSRNLKTLQYQIQQVDTYAEKIQALRKKMEKVNNKTSDSFLSYPSNKANMLSEAMEDLKKNVDDFDKVVTDYKMNLDLTEHLQEVIEECNFWYEDASATVVRVGKYSMECQTREAVDILHRQFNKFITPSVPQQEERIQEVIDLAQRLYGLEEGQKYAEKIVTRHKEILESITELCGSLVELKEKLMQGEVPKMNSDLEDFHDNCIDLLKGPGKDDQKTFSEERNEGQVQGADVLAVNGTREDGLPMDLRRTSSDKEDSAQGLILPEDTLSGEESECISSDDISLPPLPVSPESPLAPSDMEVEELTSSSALALHISGYRMHPGTGGLGKAQESALPSPIAFADGGHSKKDTFTSHFERPYPQLKAESSLASRGSAEMSTKLHINVKCPASMPHEVHDKALQQCSQARESTLEMQEKVHADSNVTKTQDRLHAALDVSPGLGSQPDTSESHQRRVGPQGNKKNSSAENSVVSLAGQAPHFSRLLSNVTVMEGSPVTLEVEVTGFPEPTLTWWVAYNDKP

SEQ ID NO: 418 - DNA, 99154 bp, Mus Musculus
  misc_feature (1)...(99154): n = A,T,C or G
cagaacaagccctctcttcgcagcgtgcacttctgccttaggaccggcgggctctgttgcctggacctcacgctgcctgcaggaccacattgcaaagctttccacacctcgcctccgggaaactcttgtgcagtatctcagaaaatcaaactccctcctgagactattcccacagaatttccttaggagctgtgccaggtaagtgtattattcaaaataaacgtatgtattctcagcactattcttaagtattatgacaatgtttctaacaagaatttagtaagtggcattgaaataatgttgaaaccgcttcatttagtctacaaagggatactagagagtcttactccagaatgcatacaaaatgtactactagtgcataagagtatttacagtgatactttagaaaataaatttaccaattattaacgatgtgagcgggctataaggcaagtttctgaacaaataccttaatcaggaaacaatgcctttttaaagttagttgtactaccagctcaagtcctgacagctggaaaacatttgcaccccaggaagggtctttaaattttccacataatcagtattctaaggaagggatggcagaagactatggggttccagagtcttcctgtgtggctgaacacaaagttggattaagaagaaaagccaccggcttggacttctgtttgctttccgcttcttttgacatttacacctctaactagggaaccaatggaattttcattgttctttgttgctagatttgtgtaaataccccatttttggttttcctttgtttttgttgttgtttgtattgggtttttttcttttgggggggggtgttcatgaattgtctccactgtattaagatcatgggtgtcttacaaataaggtaaggggaaaacaaaaacaagacaaaacaaacaaacaaacaaacaaaaaacccaaccaacaaccaaccaaccataaaccccacaactgcccagggttaagaaaatgtagtgatttctacattacttcatggtttttaaactcttaagcttagatttgtgttacttcaattatactggaaacttgtgggggaagagtgtgaaaggagtctccataaatacataaacagaggcacgataagcaagtggattagctcattaagcagaggaattaaattagattttcagctatgatgctgagatgaagcagctgcaggtctctcttgccacagtacagactgtcctgagaatctaaggagctagtgcctacttaacaagtggctgtcagagcggcatcacaggttattgctaaggaatgggagatatcagttttggattaaaattgtgcttattagcataatttattaaattctacgttttcttacttaagtgaaatataagctgcaagatgcctttcaatgctagcattctgagctcaatttctagtagtctggcaaataaacaaaatattacaaactcatcctgagtaactcctcagtgatttttggctcagtttccacatgtttttcaatgtaattgaaacattaatttgtacacttgtaatttttaaaagctttgcggctgatttatgtttttattttatttttatttatactaccgagttccctgatgtataaaaacagacaaggtgagtttaagataggacttgttacaaatagtcattaaataactggagaaagaagcgaaatcagcacattaaataacccagtgtcattcataggaacagaagttgaaaagcattattctaagccagatgattttctgaaattaagtattatattaataaactattgtaaattagtacctccacaaactcttctgatttttattgaattaatgtttcaaagcatataaccatcttgtatgatttattttaatattctcatctatatttgtagcatcatttaaaacaatcctaattaccaaaagttatagcagaaaaatgccaggcaatgaatattgatggtcattaggcaaagaaattatctgagttaataacaagaacattaaaataggaatttgtatccttctagagtacgtgtggcttttaaaatgagtaaacaatgtttgagaatcaaaccatgtttttatctgcaacatcagtttaactaactagcaatatttccttgtagcttcaaaaaaaatcaatgggtatagtcttaggcaagttctaaatacatcaattaaaaacacagacttcacaatagtcatgacccacgtgatccgaaatacgtcttacctaaaatgttctatttgtaactcgatatatttagatggctatttggagccagtacaataataacatgttatcagttttatctctgcttacattttaatagtaactatttattcagaattgttttgaaattttgtagataaattaagacaatcccctttagagtatcagaaacaaattcactaaaccaaaaatgcatttcatggtttatgtacaactttgaatgaatcaagttaattctgctttcagaggtacagtgctgccaccttttcagaattcaaatatagtccaagaacctaagttcttgtctttgtttgggatctagaaaaacttttaaagcattaacgtaaatgacgtcttacaatagtgttaatggaagacaggaggtcaagaccgcagtacagcttcactctgacttattctgaattttagaactcaccactgatgataagtaactggtacccaactgatgcgagaacaagtatttctccaggtgcagttttggagtccagtctttggatgaacactaaacacacctttttttttcttgaatgtaattttttttaaccaaagaaatgtactacagtattaaattatttaaaactctcatttaatatgtaaagtgttctgatgcaattgtgtagagataaaactttgtgaaattacaaataagatctgcatcctagctaggttttccagtcatttcctatgaaacatttccatttgttgtcatggaaattctcttcctgcctaaaatctttctttaatggcagctgcacaaactccaagtacccgtagtttgcccattttaatttttaggtaactggagaaagaagtagaaacaatacgttaaataactcaacgcttttgttagttttaaatttgtgtgtaattttgaatatatcacatcatagttggatgttaactggaacaataggtggaatacaatttatcgtaaaatttggagaataagtatgaagttatgtttcaggaacaatgaaaaacatgtgaatataagtcataataatatcataatacttatttgacaagagggcatacatattgtattccattgcaattcttaggaaagcagannnnnnnnnnnnnnnnnnnncaattcttaggaaagcagaaatttctcagtaaatccaggtgatgatttttcatgagtaattagtattatgatatttgccagttaaattggttcaagccaaataatctcaatactttttaaattaattcagtttttaaatgaataagttatcttggggaaagaaaaaattaatttttaaagttaactgagttaggatttctgggtttgctagaatcattatcttgtgatgttatacacacacacgcacacacacacacacacacacacacacacacacacacacacacacacacattcatgtttagagttcatccacagactggactccaaaactgcacccagagaaatgtttgttttctcatcagctgggtaccagttactcatcttcaatttaaattctaaaattcagaataagtcaggaattaaatttgttttttcaagactgggtttctcagtgtagtcctggctgttctggaactcattctgtaaaccaggcttccctcaaactcacagagattcacctgcctcagcctcctgtgtcctgggattaaaggcttaaaccgccactacccagtgacaaagtatatttgtacaaaacacctttctttctgcctttctttctttctttctttctttctttctttctttctttctttctttctttctttctttctttctttctctctctctctctttctctctctctcagtctgtctttctttttctttttacaggtggcttctttatgtaaccttgtattatgtaacatgaacacattaacatactgtttgcaaatatggtttttaaaagtaaaagagtttaatcaaatcgatacatggttttaataaaataatgtgacatttttaaccttctagccaacaaaaaggacaaaacattaatctcagcccaaatgacacaagcccaagttagaaaataataaattaattaaatatttaataatcctatgatattgaaaccataactattttattacagtctttggatgaaacctgtttttcagagaaatcctgttccttttaacactacaccatttggcctagtcggccatcactggaaagagaggcccattggacacgcaaactttatatgcctcagtacaggggaacgccagggccaaaaaatgggagtgggtgggtagggaagttggggggagggtatgggggacttttgggatagcattggaaatgtaattgaggaaaatgcgtaataaaaaatattttaaaaaatacctaaaagaaattacctttgtagagcatacattgtaaaaaagcttatcattattactctatttaggcttagcttaacctgagtccagttgtattttccataaaaactctagtaaatcttcaaagcgtcatttggagtgctaaataaacaacaggttggtttgcaagaatgtacttatgacatctcagttctgtggaagatctttcctgtgctcttgaacagataaagatgacttggacaatgaaaactagtaaaaatttgtcttgtatccaaacactaacccgagaccaatacttttgcagttattttgtgtgtgtgtgtgtgtgtgtgtgtgtagataaactcaatttaaccgactttctaagtataatttgaatagaaaattgggacattggtaaaagtatcagggagaagtattaacattctattaggaaatgataatttaaattatggagaaataatttaatcattacaaaaccgttatcaatagttcttcagctatttttattataagaggccaaatatagacttgcttagcttaataagaataaaaggtttagtattttataaaacaggctgcttatgtgtgttccttcaagaacttaatttcaatgaaatttgtattttaaaaacctttgtaaaaacaccccagggctggtgagatggctcagcgggtaagagtgctgactgctcttccaaaggtcctgagttcaaatcccagcaaccacatggtggctcacaaccatctgtaacgagatctgatgccctcttctggagtgtctgaagacagctacagtgtacttacatataataaataaataaatattttaaaaaaaacaccccaatatgctttattgaataaggaaaacaacctaattcaattgctttagatattcatatatgttgtgtacacacatgtagcctacaacgttcacatgtgaatttcaagttcaccacttgctagttctcttccatcatctatacattttaagtaataaccacactgctctataatgtttagtgtaaagcatgtgagaaaatacatggaatatgcttagtggaatatttgggtgtagtagatgcttgagaaatttcacaaatcatcaggtctttttgaagttcaactgaagccataatatgaatctgtacacaggcttattcttaaaaccaacactcagacaatgagaatatagcttactcgtactatggggcatgcgcaagtgtagtttacaactggagtattcaaagagattatcatcctgccctcatatagcctgcagtgtagcaaagtcttagtcactatttctacattaacttagaatatagtaaagcatgatgtatgtgtaattctagcacttaagaagctgggacaggaggtttacctaggtaaaaggccatcatgggagaattgccccaggttagaggccagcttggcctaactaataggctctagaatagcatgggttgagggtgagatgctgtctaaaataaataaataaataaataaataaataaataaataaataaattcataatagctgtcaagagtatcaagaagatttgagcaaatattaaaacatccatagaagcttaacataaaaaaaaaaagatattgtggatgacccagtaaactcaatttatgtaattaaaagtctttttggttatttgggtttttagactatcttgtaatagatatttctaattactttttaatggtaaacacatgttttcttaagtattaaaatccctcaagaattgctgtacaacaagatggaaaacacattctggttttgaaagatttgaagataatttgttgtaagagcttgatttcgagtatttgtgaattctgaccctctggagaacatagtgaaaactgaagagacaatatacatgcagtgaatgccactcacagagacacatttttaaaaaaatgcagttgtaaggcgttcctagagcctcctgtttgatggagcgtggttcccgagtctcatctgcagagggtttttttccatttgctttgctatccaaattaaaatcttctgtcatggcggcacactttgaggcagacttcaccctttgtattcttctcatcatggtttagtcgcacagggaacacttctattataacacatttgattacatagttatctcttttaagatactaggattagcctgcatgacattgacagtggaattaaataaaaacaatcttttctgctaaagtgtgataggtcaaaggtgttcagaataccttaacacaggcacaggcaatgagagcgctgtggaatccattcgattccttatttcagaatggttactttctcatgtttcatgtacagcccagagctatccagattagtattggatacagaagatatctgtctcgttgaactctgatactttagacaacaccccacttaaacaactggccgctggtcttgtgacaaaatgagaagcactactgacagcagaataaactgagttcactcctcttctggagacatttggctgttgcccagaacagaggccctgtgccaggcgtctttaaaaccaacatagggctttccacatgctaaggccttcttaagttgagaaccacattgacaactctttgttaattttgatatattttatttgtattgaattttgttctttaaatagtaatatgtactatggttaaacagcatagaactatattataatcattttaagacttaaaaaatggagtatagcatagtaaaatcatatggaaagtgtataactgaggaaaataatatgagaaatttaattaactaaaaatgagacaaatgttaagatacgttgaaggttccaacacttgaaatcttatgatttgaacagatcttatttgaaagccttcctctccaaattactggtatcagctttcaaagttctattcttaagaaaattatttttaactacatctatttttaaaaaaaataaaatcagtacgtccatatttaataactcatgttccattcagcctagttttaggactatatgcactagttcagattgcacataatataattaacaggttttatactggagcttggcatttaaaaaaagaatccccattaaatgtatggttttcaaactgatgtgaaaagtcgagtgcgttcatcaagttctgaacgtcaatattctgaagatcatgttttgcaaccctttcatagttcatgtaataaaaatttaagggagagatgtgatcgagctttctgtatgtttcctttaatgaacgtaaatgttctcctcccagatatcaacatgccacagtctctcacctccctgtagtatgactgatggtagccattttgtgtgagctctgctcaagtcactactttaaaccaactgaatccttaccccaccactgtcctcttgtgcgcatcagctatgtagtatggactggacttttcctataatattaagcaccttgcaacaaacaatctattgtaatttgcataattgctatacttttttccccaatcttgtgtattcctttaacacattccttcctcatgtttatttcactagtgttctaaaaactcttctagaaatgcctgtatgtcacagctccttaaagttgctccatgattctgtgctgctgtctacatacagaacactgtacattgacttcatggttttagatactggagcttcagttctgaatgtgttagaatctctgcacatatccatagagaaaatgttcggaaaccaatgactacctttattattcttaggttaatctaatatttacccctacactgtctttgcgagggaagataaaccggtaaagatgctttctgggatgagtctggcgttcaggtttcacttgatttccaaggaatgaaccttccaactagttaaatgagaatggagcccagtattttgacacaaagtgttgaagtctttccacaagaggccaaacaatggctgaactggcagaattattgttgaatctggcaaacttgccaactgttggctcccgacaaagccttactccattacttactgcctttctggacaatggagctaggtcatgtacaaaggcaaagagccttagcactggacatgaaagaaagcacatcaagcatttgaaaaatcacatgtgggagaatgcaaatttagtttaacagtgaaagacgtctaataggcattgagttatatgcctgttatttgtgatctgttaagcttttaaacactgatcaacaaaagctcttaaagaatgctaattctcaacgtccttcatatgtgcacagtattgtaggtttattaaagttaaagtcaaagtatttttttataaactcagaatatacatttatatgtacagaaacagactctgacacacacacacacacacacacacacacacacacacacacacacaaatagagagggactaaataaaatatttgtcacaatgctccatgtttgactttcaccaaatgtatttttgagttgatgtaattcacaagttataaaaatacaaccaatcttttgtaatttaggtttctcatttgcttgagagtcatagagctagccattcattcatgaagtaatagctcagcggcatttactctgagcccagatatttatataattcataaatacaaaatttatggaggaaaaagagtgatgtccattatattagaacatagacaatgtatattcagagcctaatgaatgaaaacatacatcatagctcatatcttacccttattatctagtagcaatagtggttagagttttaaaccataaacaatgaactgcactggattcattatgctctgcactgactaagcactgctaaaaatcaaaatcaaaatgacttcttgttgccgttcttttctatcatttaattctttaacttcccaactgcacttcacatggccattgtcaagtactgtatttacgattaaattatcatcaagtgtagagaaaaccatgctcttttaaaatgtaatcttcactaatgtgtttctaagaatgtaaagatctctgcttgctttattttgtagtttttatgaatataagacaatgcagttccatgcaacatattttcttcattctaggtagcacataccaggaaataataaaataacctggcatcgataatacttgaaaaagacaaaatagcaataatttctaacaagtggattatattaaactgtgcaaagagtacttaaaaataaattaactacaagaaaagaaatactttaatgaaattttagtgcaaaaatgattaatttctcgatttggagagccacttcactttctcaagccagaaccaatctttacagtaacaaatgagtttctcatgtactcatgtttagaacgctgtgctgaaataattcttctttcatctagatttggcagaggcaacaaattcttatgaaagtctctaacagaatattacttataaattgaatatggtctattaaaatatttaatactgaattacacctgtgaaatttgctgtatattttatttttttattttattagatattttctttatatacatttcaaatttcaaatgctatcccgaaaattccctataccctccccctgccctgctcccctacccacccactcccacttcttggccctggcgttccccggtactggggcatataaagtttgtaataccaaggggcctctcttcccagtgatggccgactagaccatcttctgctacatatgcagctagagacacgagctctgggggtactggttagttcatattgttgtccacctatagggttgcagaccccttcagctccttgggtgctttctctttgctgtatattttaatagttcaataattactttaatttgcaattcattgcagagagaaattctggcacagcataaggtgggtggtaaatcacgtggcacagcacattttgactcatctttatgctggactcccttggctctctgaagcatctccacggcaggaggttggtagcagcaccagtgactaaataacagcctacaaagagaagatagtatctgaatcaattttgtaattcacgatgttacccgaaaacaagtgttattttcaatttttgataagaatcatttcaacaaactcctgttgggatctagtctcttcagatagttatggaaaagctttaacatatagcatagtttggtcaaatattttaaaacccataagcatttaatagaacctaaagtgtttcacttttggggaaatctagaacacttgcaacaaagtgaaagacaagctcggagacttgtgtagaagttgataaattaaagagggacgtgtaacagtcacttttattttctcagaagaagggatgaaggaaggatgagagctgtacccgagttgtgagaccacatggcttgtgctgagctctgagtgtttctttctttgctttaggtccaggccagcctccatactatctaatctaaactgaccagtttaaactggcttctcttggcttcccactgagttgcttttttttttttttgcctcaaattaactctagcaatttgttcaaatcttctggttccttttcattctctgatgcattctgtctacacctgtgaccagtctctctgtaagactgtcctggtaaaaatccccccagcccccttcatgctgctttattaagttgcctctctttattttgatgttctcttaagtacttcaactttctatgctgagtgttgggcgtatcctatctctgattcattctgttcaaactttctctgactcattactttatctacccctcaattagatgttgctttcaaacatggctgctttcttctacaataaccgcatcttcattgtttgggattaaaggtacgtactgaggacatgtctgtattccagccagtgggattaaaggtgtgtcattctagttgaaacacactgacatagaagggctttggatttgatccctggccagagcagtcttgttgctagattaaaattctactacaggagcactaattggaatatttcacttaacagtaattataacagactaagtgaagtctgatataaaatcaagtcaagaataaaaattgaaagtaagaggaaatataaaagtcagaaaaaaacattaaatgagcacagcaggttgaatttatatatatttaaatgtatatgtatagtttgtgtgttttgtgtgtgtgtgtgtaaaacaatattaaccaaaaataagaggtcatgaatttgagaataagtggaggataatgtgaaaggagatggagggagaaaagtgagggggaatgatgtaaatacaatattcatatgaaattctaaaaaactaaatgaatcaatttaaaaaaaaggaggattcaattaaatgagcaaaattatgggataaaatatgaggctagataagctggctcaataagacatactttacttgccagaatgattatgaaataaaagtccaatctcaaagcactcatttaagacagggagatgtgagatagatatatggctatggatgacggatgctaccaagagtactttttaaagttaataatcaagcgttatttcttggtctaaaattgtgttggaaaaaaaccttgttgtcttatgtttttgtgtacttggggttaagtctaagtgttactgcactaggtaagtgccaagaagtgtctattaggttgtgagaagcaaatagatttactgtctttttgttcaagggattgaactcaacaagtcaagataacagctatacttctaaatggtggtgtcatcgagtctaaactgttgacactgtccagtccctaaggatagtttctgaagaggcatctcagaaactggaatatcttagtcatcacactggaaggatcagggctatttggtacaattcaagtccttttcactaagcatatcagacaatatgaggtagttcaacataatcagatgtaatgcttaagtttcctactgtgttctgaagttgttctgtttactgacaccctgcagattgtgagaatataccacaaagatatgtttaggtccaaactcacaataacagcacatgagggcaaaacaaattacatatttaaattaagtagtcatcttttaaaaaaactctaagcattcaaaccaaaatgccaaaaatatttccaaagatatatagaagactttcttttttaagccttggttctgaataagtaacattgttattcaggcacacattttccctctatgaatcatataatttagaagtatcaaaaacttgctattaatttacatgataacttttctgcctttactggactcagaggtaaaaactcatacatacatacacagatgcatacacacagaaacaggcatatgatgggacacacacacacacacacacacacacacacacacacacatatatgcacacatacatgagaaagcatacattaactcaagggattttcttttatttgccattttaaaacaaaataaattttaataaaataaaacaaaacaatcacattgaagttggataaggcaatggaacagaaggaaaagatccccaagagaaggcacaagaattagagacccacttgcccacacattcagaagtcccataaaagtactaaactaaaacctataatatatacacaaaggacctagtgcagacctgtgcaggtcctgtgcttgccgtttcagtctctgagttcatgtgaaccttgctcagttcatttaatgggcctagttctccatctcctctgtctcttacagtatttctgcctcctcttctacagggttttctcagctctaaaggaaggatttgatggaaacatctcatttagagctatgccttccagggactctctcttcgcataatgtctggctgtggtcctctgtatttgttcccatctgcaggaggaagcttctctgatgatggctgaataaggcactgatctatgagtatagcagaatatctttaggagacattttattgttacttcgttgtttttgaatctttattgttacttttttttggccagtagtatttggctttacccaaggcctctggggatatctagtctctggttcttggtcacccaagcattgtcaagtatgggttccttcttatggggtagttcttaagtcagacagggttaaccaaacattggttggttagactcagggtttttcatcattggtaacccaaaattctattactagtttcctagaagactcagagtattaagtagattttaaaaacaaaatcagatggctagaattcagagaagtaaattatactcattaaattccaagtacacagttaattcttataatgatacttatgaactctcatgaatattgtaacattttgactgtaaaaggaagaaaaagattcaatttgtttgcattatgagagtcaaagccattccccccaccctgtattcttgccatacatattttgattcaaagattcaaaatacacaattctctgcagttatactacaccaatattctatacagttttctttctaaactttgtgtctcacttacagattgtatctattataaatatcctacttaaacatcttttttttttttttttttctgagacagggtttctctgtgtagccatgactgccctggaactcactctgtagaccaggctggcctcgaactcagagattcatctgcttttgcctctcgagcactgagattaaaggtgtgtgccaccacctcctgactaataaatttcccatttaagtaagcatcctcttactagaacctggtgtgaacgtcaagttcctgcatcactgatttacacatttagtcctccctgtaaactgtttccctatactaggctctagttatctgaagatcacttacctggcataacctttttaagtaatatattatttagttttactgtttctattttttgttatgaaagcacaatcatgttttctctggcaaatgttttgtttacatagcattgtagtttttgagatacatcagcgttagagtctgctgtgtgatatattatttaacactacttcagtattccattccatgactgtatcggagtgtacctatcctttcttctgtggaatgttagagctgcttccaacatttgacttttacaagccatgaagttataaacagtccctaacatatctccccataaactgcatggattttttttttagagaaaagatttataagacatatttctaagccatccataatagtgaccctatttaaattctcaccaacagtagatgagacacttattgcaccatagcctttccaaaactgtgtattgtcaaacattctaacttttgccactctggagggtgtaacacaatatctcattgtggttttgatttacatttctctggtcatgaatcatggtgaatttgcttgttaaaataataaaaattttcctcttaaacatatgcttcaaattaggtaataattagttgatttagaggaactgactaagccactttttgtggatcacctatcatgatttctctattgtctatcatctatctatccatcacctatcaatcattggttgatacttatcctctctatatagctgaattttattaactactgaaaataagttatggagcttacagatcatctgaataggatgttcctctttccccactgttgtaatactaacttcttatccattaaaaccttatggaaggcactggaatttgtgttttcacatgagtcacaatttggcaactacatagttgtctttttaaccataggctgaatttatctcatttatttcttcaaggctttgatttcctcctaatagagttaggtgtaggtttatttctctttagtttatttaaagtcttcatattaatatcaaaacattgatttaaataatggaaacattttatgatgaaagcttatttgctatgtgtacatcctgtgtttcttttctatgttctcaagatctagtttattttaattccatttactagttgcttatttataaatttttatttatttataaaaattagttctttatttttaatctagttattttttatatttttgtgaggttcgtgtaataatactttttatacttcatattggatattaacttacttttacaacactatttggtactatatgtatactatatgtacagctatcatataaaatgaatgtaagtttgagagcactggctgttcttccagaggacccaggttccattcccagcacccacatgataactcataaccgtctgtcactccagctcttgagcctccaagggcactagacacacacgatacacatacaaactgacaaaacacccatccaattaaataaatacgtgttaaacttaaagtacgcacatggcaacttatacaccacagttttgttcatatatgcaagatatttatcaatcaaagttaactccatatttaactttatgataaccagggtaactggtttcatgacctaattatccaagggtttaaaatactcttccatggtcactttgggatttaaaaaatgaaaattttagaattatactgagaaaaaaaaaaccactaatgttcctcagctgtttctatttccagcggccttttctaataagttgggaaaatattcaaaataaacttcaactttgaacctgctgaattccatatgggtgccaataaagcctgaggctggagtttttatttttttcaaaagcatttttagaaaaacccaattctagatttaggcagcattggtttacagctaagtaaatcttaatataaccagatcttgatcctaataatagcaaagttagattacaattatatatagaaactatggaagcataatacatttttcttatctatagagtagtattacaaggtaattaaaataagattttgctaacaaaatgctatgttttaaaaaatagtcttcttaatatgtttgaatgtgtctttattagatattttctttacttacatttcaaatgttatcccctttcctggtttcctctccccctgctcaccaacccacccactcccgcttcctggccctggcattcacgtaagcttttgccttgactttatagatatacttgacaacggcctagatgatcattaaagcatggcagtagattcgtggatcatgagggcaggatcaacaaaatttctcagctcacagtgagaggtagacacatcacagaacacaaatttgacatctttgaagttcagtaaattttaatgcagtatgaatgtaaagcagcgaaaaatatataatgatctcgcctaactgttagcgttcactcgacctggaaagatgtatacaagccaacatatgcattcagtttatttatcagtagagacaagttcgtttctggccctaaatgtctctgggttcctcttagatcagatctatgactacacttgctttcaatccttccactctgacaatgctaactttctacccatgcctcacaccagctaagtcattcctgtctcagaaccattttcaaaccatcaatgtaggaccaacgtctccctagggcagtcacagcagcctgcctccctcaccaactaggctaacactacgtccttggaggcttttcacgatagccacagtcttctccttatacttcatttgttcgcattgtttttctttgctgcacttactaccactggacctttaccgatctaactgttggtaaactttctccttagtagctctagcaggaatggactatggtgtccttaacttatagagcacagctacactcctgtagactttacctctttctagtgctgagatctcaagcaataggaaacacctggccccatgttttgtccctcagtgaccctgttataaggacatgttgccaagctacaaaaacaaaaacaaagtgttttttttttttttcccccttctcatttctgggctagtttaatggtaacctaaatgagacagatgtatctcctctgaacttcccgttcaaacccaccatttaaactgagtattttgacagagaaccacactagtatatgctcttaggttaagttctgtatgatcccactttccacttacaattttaccaaattcacaggcatcttcttttgtcatccagggccctatgatgatacagcaacatcttgtgctaccaactgtcgaaactttggatggtctaacactcaggtattgcatatatttcaacaaaatatataaagtaacatcttggattggcaataaagtcaagggtattatgattgcattaagtatagggacaaaaattccacagaagactgtgcagtttacttctgaataaaaacattgagtggcaacccaataaactactgatataggtggaattgtgtgcacctatcaactcaaaattagtgtcttaggacattgcaaagtagatttaaccctataattgtgtgtcttgggctagatggttaggaatattaagctaattttaaatgtgtcatatttttatggtagtgatttaatgatataatttaagtttaaagtcatttaatatatgcatgttacatcgatctagagatgatttttaaatatgataatatagctaggtcattcatttgaactaaatgtctgcttagtataggattctttgttttcctttttattttattaaaaacaatgaatttatgaaattcttgggcaaatggatgtatctggaggatatcatcctttttccccccacatttttaaaaattagatattttcctcatttacatttcaaatgctgtcccaaaagtcccctatacccttcccgcacccttctcccttacccactcactcccatttcttgaccctggtgtttccctgaactggggcatataaagtttgctagaccaaggggcctctcttcccaatgatggccgactaggccatcttctgctacatatgcagctagagtcaagagctctggggtactggttagttcataatgttgttccacctatagtgttgcagaccccttcagctccttgggtactttctctagctcctccattgggggccctgtattccatcctatagatgactgtgagcatccacttctgtatttgcccggcactggcaaagcctcacaggagacagctatatcaggggtcccttcagcaaaatcttgctggggtatgcaatagtgtctgtgtttggtggctgattatgggatggatccctgggtggggcagtctctggatggtccatccttttgtcttagatccaaatgttgtctctgcaactccttccatggatattttataccgtattctagggagaaatgaagtatccacacgttgttcttccttctttgtgattttcttgtgttttggagattgtatcttgggtattgtagctttctgggctaatatccacttatcagtgagtgcatatcaagtgacttgttttgtgattgggttacctcactcaggatgatatcctccagatacatccatttgcccaagaatttcataaattcattctttttaatagctgagtagtactccattgtgtaaatgtaccacattttctgtatccattcctctgttgagggacatccatgttctttccagcttctggctattataaatagagctgctatgaacatagtggagaatgtgtccttatcacatgttggaacatcttctgggtatatgcccaggagaggtattgctggatctagtggtagtactatgtccagttttctgaggaactgccagactgatttccagagtggttgtatcagcttgcaatcccaccagcaatggaggagtgttcctctttctccacatcttcaccagcatctgctgtcacgtgaatcttttgatcctagccattctgactggtgtgaggtggaatctcagggttgttttgatttgcatttctctgatgattaaggatgttgaacattttttcaagtgcttctcagcggattctttgttttctcaaccacataatcactgttagatcatgtctgtgaatggggtgagataaaagtttcttataattagaatacacagggtaccttaattataaataaaaaaacagtcatatgagctgcttcactattttgcagtattccagataccatttttaggaatccttagaaaacactgaattttattctgtcaaagaacagcaagcttcataggttttggtgcatccaaaaagacagatgtgtcagtcattgtagtgctatggcaaataaaataactaagcatctatttgctgcacctgacagtccccataatatttaattagatcttcttacactaacttatttttggtaaagctgaaggttttttttaaataattcaaaaatgattttcctatgaaggtataataattgtactgaaagtaaaattgtgttatcttattaaagctttgtgagatggttccttttttctctctctctctttctttctttctttctttctttctttctttctttctttctttnnnnnnnnnnnnnnnnnnnntccctccctccctccctccctccctccctcccttctttctttctttctttctttctttctttctttctttctttctttctttctttcttatttttgagctgtgcatttcttaataaagaattcccaactaggccccaaaatagagcatgtgtaattgtcctttgtcccactgcctgtctttgggaactcatgagtgctctgtcccttaatgtgtcagcttcctctgcaccctgcatttcagatgactcagtgttcctcacagcaaggtctgagtgcaccgaaagccaacatgtatgtgacagctgcctttgtcttcctgatatccccaatgtgatgtgacgccaaatcacgtcttataattttgcttcataatgatagcagggaagaacctgtaagaggagttttttttttttttaatagaaaataactgggtttggcttcccaatgtgtgtatcataatttggcatcagggaagattatacaatactttagaatatcactgtgaaaattgtagcatgtatttagtagttttgaagaaatgcaatgagaggtccaaatttaaactgttgtctcttcagttgcttcatcccatatgacttattgagcatggtcgtgtgtgtgtgtgtgtgtaatgctaaatgtgcctttctaattatttttattttaacaataaactttaaagtgcaaattaatttaaaatccagtaacaaataggttcaaaatatcatcaccatggcaatgaaacatgtaactaaaagtaggaattgacttccattcatcagtttgaatcaatgatggtttcgttttggtctaataaaatagcccaaagctcagatcaaggagacatgatgcctggttttagctcagtgtcactgtcttggaacatattgtaattcactaacttccttggctcctatattctgagtctgaagtctgtaaagtaagcagatgacactgcaagattttcaagtcctcctcagttctgagaatctggcatatctgttaaaatcctttgtcctaaagatgagctgaaaacccatcagcatatgcatttctttctaactaataacaacacggtcacacttctggtcttctagctccaagcattttggaatggttaatttacacaatcacttggcgcactccaaaacctgactaataagaggtagaaggggacaaagagcaacctctctgactacattatactttgagagggacctaataatagctatcactgatgtttaataatcttgctcaaagctctttctgacacaaaatggtaaaaataccaatgatcaaatgcatttctaaatattttctaggaatatttcacatttaaatctttatctaatttgaattgaatctaagatattttcctacaaatttaagattcatgttttacacacctttattagtttatcctgatcatattgcctaaaaattctgtacagtaattattacaaaattatagtaaccaagttgtttggattttagcttccatttggcttttcttttagcttgaacactagaattatttgttaattctgctatacttaatgttattttgaagttaaataatcaattttggtcttggaaatatgaatataaatattggtcaataataaacagttattattattggccttaattaatctttcagtcaaagcatgttagatatcttttatcaactatattaattttgatcaaatattttcttctaaaatatgctataatgaatacaataaaatataactctactttatttatttatttatttatttatttatttatttatttatatttgtttatatagatgctggttgttgaactcaggacctaacacatgctaggaacaggctgtactagagctacatacctgactatctataattcatggatatctattagggtcatagctctattagttattcttcactttcagctagctctctctgctgtgctacctctatgtcttgcaaagattattcaatttttgcctaattcatctccttagtagtagatgccttcatcatgttacgtgaatgtttagagtcctactagcatttttaaaaatattttttatatttctactggtcagtaaagacagatgcaacacatatgtttctgttcagatgagcaagtttctacttcaaacatttgagagatttctagaacctatgaagaaacaaagggtatgtttataaaaggggcagagttgttcactatatttttgcaggaagttcctgctgtggctaaacactctctactttcttagactattatagatatctcacaaaggaaaaccaaagacaaatatttgcagctgtttatatgctgaatctaaaacctccctccaatgagaaccagaccttggatgtaaaggaaaggaaaactatgacccaatctgcctgaagattgaactgccaagccccagctgctggtcacgttcatagcaatagcttggaaagatccacttcattgcaatcagaacatttttatattctagtctattattatcatcaggtattctacccttttttagattttaaaaaatgtgtatgaatgttttatttacatgtatgtgcaccacgtgtccaagacagcatgcctggtgtccaggaatcccagaagagagcattggatccatagaacttgaatgacagatagttatgacccactatgtaagttttgggaactgaatccaagtcctctacagaagcaacaagtgctcttaatcattaatccacctgtctagctccctaatattctatcttttatatggtaaaattcacacacacacacacacacacacacacacacacacacacacacacacacacacacacacagtacagttatttgaacttaggtttaataatagaataaatggaatcaattcactctaaaataggcatcatttcattagactttcccagtcttgttcaaatttgggttgatatccaacaaaacagaaaaattacccaggcttaaatattccatttcatttattctggttattggtgttactttatttgctgttggtgttttgttctttatttctgccatgttcctttgagtagatcattggaacatgactttctctttgcacatatattagtttttaagaaaacttccttgacacagttttaaatccatatgattctataaactaaatgcactttatttcagatacaagagaaaatataaccttagctcaaaaataagcttttcttcaatatttgtcaataatcacatgtgccaaacatatcaatttaagatctttcttaaagctgtgcatggcagcatataactgttatctcaacactttggtaacagggtcagggaaatctaaattcacagatatactggactacacaaagtgaccttgttacaaacaagcaagcaagcaagcaaacaaacaagacaaacaagtctgttccccgcccctatgtgtgtgcctgtgtgtgtctgtgcatccatatgctggaacgtaggatagagggcaacactgagtatagctccttaagaggcttctatctagtaaacatgttaactagattaaataatgaaggaattagactcatatacttaattaaattcattattaagataatatgcaaatgaatatatagagttaggactggcggaccaggtctgtaatcgtagctacgctaccggggagggggaagcaggagactttcaggcttatgggccgtgtcacttatcatgactccatcttagagtaaaagacagaagagaaaaactggagatagagatcagtggtaggactcttgcccaggatgcacaaagccttaggtttaaccctagtaaaactgtcaaaaaataagaaataggaaatagtctctacctttcacatgatagagctctatgtctttcaaaatttatagatatttataatcacaaatgagtaggacagaatgcttcacataaccattgtttataagccaaccaccattaaatcttgtatcatggctggtttataaatggacagatataattgtatgtatgtacagtgtgatatcttgaagcacatatacatgacatcagactactacatccagccacttagcacatgaatctttttacacagttactttttttatggtggaaacaccaatagcacctttcaaggattcctaatattgccattaattacaatcagcatgctgcccaatcaatgcaccttttgaacgtattccttgtctgtaactaattttgtgccctgtgaccactgtctccccaaccaccaactccatcaactccacaatgtctttggggactgcaatttaccatccaggtatgtaannnnnnnnnnnnnnnnnnnnnnnnnnnnnnnnnnnnnnnnnnnnnnnnnnnnnnnnnnnnnnnnnnnnnnnnnnnnnnnnnnnnnnnnnnnnnnnnnnnnnnnnnnnnnnnnnnnnnnnnnnnnnnnnnnnnnnnnnnnnnnnnnnnnnnnnnnnnnnnnnnnnnnnnnnnnnnnnnnnnnnnnnnnnnnnnnnnnnnnnnnnnnnnnnnnnnnnnnnnnnnnnnnnnnnnnnnnnnnnnnnnnnnnnnnnnnnnnnnnnnnnnnnnnnnnnnnnnnnnnnnnnnnnnnnnnnnnnnnnnnnnnnnnnnnnnnnnnnnnnnnnnnnnnnnnnnnnnnnnnnnnnnnnnnnnnnnnnnnnnnnnnnnnnnnnnnnnnnnnnnnnnnnnnnnnnnnnnnnnnnnnnnnnnnnnnnnnnnnnnnnnnntcccacccactcccattttttggccctggcatttccctgtactggggcatataaagtttgcaagtccaatgggcctctctttccagtgatggccaactaggccatcttttgatacatatgcagctagagtcaagagctccggggtactggttagttcataatgttgttccacctataggtttgcagatccctttagctccttgggtactttctctagctcctccattgggggccctgtgatccatccaatagctgtctattcctattgttttaaggaagccctattttccataatgtccacattagctatatatgggcaagggtttctttttcgtcatgttgacacatcctttctcatctttcatgggtttcatcctaagtattctaaccaatgggaggtgataccatgggggcaagactagagagacactgattacaggataaaaatttccctgtatctagggtatggtcacagtatgggcactatagtcaatgacaacatattttctttctttttttttttttttttttttttttttttttttttttggtttttcgagacagggtttctctgtgtagccctggctgtcctggcactcactttgtagaccagtctggcctcgaactcagaaatccgcctgcctctgcctcccgagtgctgggattaaaggcgtgcgccaccatgcccggctgacaacatattttcttgacacatcaaacaaacattaaaatctttcttagtcaatattttatatataaaaaaaatcctcacagtttagaatctctttgtggtaggaagaaaacaatgtcagagacacagcaagtttcctgccatagacatcctgagatgctgacccagcatgcagggtgtcttcatgagcttcagatctgtgtttttccctcagattatacagaaggatttatttttgtcttgtttctcaacattttcaaggcatactgcctctgtttttgttgttttgttttgtttggtacttctagtttatggttacatccgcttatccatgcacacactttggggaactgatctgaggcctgctcaccgttctctagggtatcattgaaaagcttttgttgaaaagttcagtgacatacattgccagcttaaacccttagtcagtgtcccaacctttagaagacattcatctacatgtgtccagagtggaagtctcttctctcctgtatccctgattccatcagttcacgggctcacactcagatggatgccctacagcaaaccctcttttccatatgctgcactccgatgtttgcagcttcaggctttgcccccaagcctgtgacctgtgatactaatcaaagagtgtctccacagtgccattttctatttttaactaaaccaactagttaatcaataataataataataataataataataataataataataaaaagaacactttgcatttcatgttttctaggaggttcagtgccccggggatgtgaacaaaagtgcgagggggtagattattgtgttagctgcaggcagacgacatccttagccaattgcacatctgtagtttgacctagggatttatttatttatttatttacccatatctttatttgttttttcgagacagggtttttcctttttgctctggctttcctggtattctctttgtaaataaggctgacctcaaactcacagagacttgcctgcttctgcctctcaaagtgctgggattaaaggtgtgtgcctctccaccatggcagtattatctattttataatgataaaaaaatagttttctcattctcttataaggtaggttgctgataattacgggctttttcaatacaggatagactttcaatgagacccttttttgagatgactgtgatctacataaagatattagcagtaggtttaaaatttgctcacgtttataatcttgttatttaaagttactactgtgtaaaacagttgagtagtattgagaaatccagaaaattccttgagtgaaagtatattaattgactttggtaagcaagtgcaattatacaattttcctatactcaaagcaaggtgggaaaatttccttctcataggcaaaatttgcatacaagttatataaatcaacgctataacactattctctcagtttagatataatgctttccattctttctgctggattggagcaactaactatatccaatattaaattttcattacagcaatggctaacactcaccgaacgcttatactttgctagaaaacggtttcagctcattattggctgatcttttattttgtgatcacatgaatattatatagagcatgacatcattattatttatgtaagcattgagtttagaagagttaactatctttcctaagtgacaaggatatgtacagaagtttatatgattaatccaacacaattcatcttcaggcactgtctatactcatctggtgcccattttcagtcttgcaactatccggtccccacttcctccagatccaggtgttggcaaagcagctttgaattaccctcactggtatttcatagttatggagacacaaaccacagttttctctgtgtgcccattctttcaccaccaacacacaaatctagaggctgagtaaaaggagtatttaaagatcaggccattagttattaaaaactgctgaatggtataataatttatattattatctggggtgttcaaaaccctcttttatctttttactatgctaataagaatgatttaaatattgttagagcctaacagcattctcttgctttcctcttatgagaacatggacgaatgcattgcacagttatcagggtagtatgacaacgtgccttgctccctcctgtcttatgcctttgcttgttttgtttcttctatttggaatctattctgtctcctaatttctcactcctctacttatgtttcagggctaagttgttctagtcatcttagagccccacaaacataaaaccttagaacgatcagtctttttagcacagactaagaagcagaagtcccttcttgccatggctttccgtttccatggtttcagttatccagagacaagagaaatggaacattgcaaagaaaaatgattaacattttacccttgtgcagctgttctgagtagcatgatggaatcttgcgtggctctgtgccatctaactcaggattttaatcgaccctttgtccagcatatcatgctacatatgtgactgggccttgaggcacattaatctggtaggaactgccatgcttatcaggatagaagtcacagcattcactgcttgtgtttgagttgtgctttattctacatatgttcctcaaagcacatgggtagcaatgctgtcaatcaattttattgcagtattttgttataatttttccatattctgtgttattaactactttgatcttattttcaatgaccatgaattaaactttatcaaagttgtgtacaggtatgagaaaatctactggtggtactggagtgcactccaggcagataggagaactcttgtcattaaatgttcactgtgtttaatttgtcgtctggaccagattacaaattctcagaaaacaaagtacacatagcacacattctagtcatagtcatgctaattgacagaaaataatcaataaaagtagttatatgtagaagtacttcctgaaacttactgagcaacaaatactttgaggtgtcaccaactgtgaaccaatacttaatttacccactctattttatactaagcctgagggtattgaggcttgagtccttatctttggatgcctaaattattgagagaaagcatgcttagaaaatagataggagaagaaaagttatacattctaaatagtttagagaagtgggtcagtatatgaagctgcatccatctctacagctcaattatctaccatgttccgggtagggactctaggaagaaacgtgcagtttccccttaaaggaaaaacaccatgtatctccttagcatggcttagggacaggccctcccaagggtaggtggtctcttgtccagtgattgacccttcccaagtaggatattaggttttatccaaccacagatactgttctcttcactaggactttgttttgtctgtaatagacctttattgctatcttaacacacatgagtgagcttcaacttaatagtaattgcaatgtttttgtttccccttttctccctccctcagtccctctctccctatcttccctccctccctctctatctctcttctttctttcttctttccttttcttctttcttttgtttcagtgtgacatacacatgacagtattaggactgaaatcctgtttgcatgctaacatatcagtatcaacattacataatcctaaactattacagccgagttcctctcaattgttttaagattgcctatgctagagtttagcagtagttgattaagttgctttgtgcttctggcaggttgcactcccagccaccagccagagccctctggattagtgaatgaaacacacacacacacacacacacacacacacacacacacacacacacacacagaggctgggcagctctaatccttcccgctgttagcaaacactccctccagtcctcctgagttaacatcttttaaaatctatgtttcatctctgatattccaaacacaactggggaggtggcttgtgtggccacttttcttgattctcacatgtcagtggtcctttatgtctggtctttctacttccctatcatggtgatgtctccttcttcctttcttcctctccatccccaccccgcaaatccaaaggtcccgcctcagtctaccggcccaactattgatcgttggctctttattgactgatcaaaaaccatttggggtcaagaagcttcagcttttgaacaccgattttgggagctgaattaattccaagccctagaaccaatctccaacactggagtcgggggagaatgctctcattgggcaagagcacttggtggttaagcagaggactgacttctaatcccagtattcatctaagaagccaggtatggctgcacctcctaggggtcccagcatgatgaggagtagaacaggaggaacattggggcttactgcttccaggttagtggaagttctgtcgtcacaggagcaaggcaaaaaatgtcagtgcaaacacatgcacacacatcatacacacaaatccccattgccttgaaaaccattttcttaacgtactttgtgcagtagtctcagtacttgtagggctgttgagtccaaggagtgagaagggcatgatttctgagaggggggaaatagacaaatttgaactatcaaggagcttctgctctttacatttttatcagtaattaaagttggtaattacttcaaacaccccttttatcaaacaaacaccagaataaaaatcaatatattgctcatttaaaaacaaacaaacaaacaaacaaaattatatatatatatatttactcatttagcttaaggaaagaggaagatttaccacacagaaatcatctaatcacaaagccataaatcccacatctacagtgctgttattcccaaaacaaaatacttagactacagatgtccacaggggccatgggtctctaacctgtcccccctgaaggcccctggctccatctcctactctctgtctataaagttcttttcctatgagctgtgggaaaggtattttttcccaaatcagcaaactttattcttagctcaaacttggtatttgcttcttcaagggtcctacttggcttaatcaatcctgtattccatgggctccaagttttgcagtatctctgtgctttccacaaccagtgttacaaaaggaaggagtaggcagaatattattgctttatttctgtaattccaagttcaccagggctgctaccctgctttcctctgtaccagtttttaaagctggccaaggtagtctttcctaagtctgctcgggatcctagttttttctagtctttggagaaatctaaatgtcttttgtatagtcaacacccccattattattgtaaaacgttgatgtcagtcttatctaaaaataaaactccactccacaggtcctcccacacctaccactaaacccctttcttctcctttccaaaagccaaactcttcagaaggcttcttcattctaataattttcttcccttacacccagcccggctgcaactgacatttaacgaacaatcataaaccaaatatttctctctgctggaaccagatgtttgcaggtggtaccgggcgcagaccagagtcttaggcacgttatctaattctaggttcagtgtagtcttcaggtctctacctgccttcacaacctgtctcatagcgcctactcctttgccctctgtccccacccacctctgataggagccatttgcttttctgtttctcaacaactatcctctaactgcagatgtctagtgaaataccacttcctctgggaaatcatcccttgagccactgtatgaggtcatcgcttcccttcatagggcttatcttcatttgcaactttaaatttgtgcttcaaatttatactgtctctacaggacaacttatcaagaacttttatcttatctcctttcaattcttgttgcattgctcataccttgtcctctgtcaggtgcctactggtgtctcaataaatcatgtcatagtgtgtggatcctgctttggagcactattgtgtcgctgtcctccgtgggtaggccatcattcaaattgcttgactctaaagtcaaacatctgctgctgaatctcttctgcttaaagttactaaactctcctaatacttgaggaaggaaactgtcagaaaatacgtatttccatacagatgctagaccccagcatctctttgttgtcccagagagacatccttactctccacgaaggttatgaccaagtcacaacaaacaagccttagaagctgactcagaggactgaggaaaaagttgtaaacactttcccagggagatcaaggcaattatccatcattattgggcaaacagggtcaatttaaggcattcacatgtaaaacatcccttcacaaaaccactcagccccatgacagtcttgggagaaagatagtgatgccagggacagaaacgactccagacctttgagcaagaacacttgttggcaatgctctgaagtcatttacttataaatcccataaacacgattgctacttttttgtaacaaataaatgtaatacttccacaaaattgcttagattactatctagactatagagaagaggaattcgataaaaacaataagaggaaaaaaacccctctctcttattttccttcatcttggtgtctttagttatcacaggaatataattatttccaactgtatggtgattaaannnnnnnnnnnnnnnnnnnngtaggccatcatttcaaattgcttgactctaaagtcaaacatctgctgctgaatctcttctgcttaaagttactaaactctcctaatacttgaggaaggaaactgtcagaaaatacgtatttccatacagatgctagaccccagcatctctttgttgtcccagagagacatccttactctccacgaaggttatgaccaagtcacaacaaacaagccctagaagctgactcagaggactgaggaaaaagttgtaaacactttcccagggagatcaaggcaattatccatcattattgggcaaacagggtcaatttaaggcattcacatgtaaaacatcccttcacaaaaccactcagccccgtgacagtcttgggagaaagatagtgatgccagggacagaaacgactccagacctttgagcaagaacacttgttggcaatgttctgaagtcatttacttataaatcccgtaaacacgattgctacttttttgtaacaaataaatgtaatacttccacaaaattgcttagattactatctagactatagagaagaggaattcgataaaaacaataagaggaaaaaacccctctctcttattttccttcatcttggtgtctttagttatcacaggaatataattatttccaactgtatggtgattaaattacttcatttcttttactaaaaggttatgggttgctttctaaaccatgcatatttatatgtacctatcaatagaataataaaaaaatctggattatcccgagtcaaaacaaaaaacagttgcagcaggcggggtttttgacagaagatgaaggtcatatattcacttcccagatactttagtgtaagaattgggctcagtggggatttttttttttttttgggtgcgtgagggtggtgttctgtctgtctgtctgtctgtctgtctcgttcttttgatacatggccttcactgttggtcattctggcatagatctcactgtgtctcccaggcttacctcaattgaggcaggcctcctgtagacctctgaagagcaagcaggagttgccattcattgtctttagtttttataaggaaaaaaaaaaaaacttcacacatagtagaaaatccagtttgggtctgaggctgtagctcagtggcagaggactcccccagcacataagaacccctgaacctaatcccaaacactaaaacataacaacagtaaaactggcatgattcttgccttgaacatctttgagtcttatagctggtctctatttttcaataatgttccaaataatctttaaaatataaggcaaatctcttcagaatatttattaaagccccgggaagacaaaactcatnnnnnnnnnnnnnnnnnnnnttgggcaaacagggtcaatttaaggcattcacatgtaaaacatcccttcacaaaaccactcagccccatgacagtcttgggagaaagatagtgatgccagggacagaaacgactccagacctttgagcaagaacacttgttggcaatgctctgaagtcatttacttataaatcccataaacacgattgctacttttttgtaacaaataaatgtaatacttccacaaaattgcttagattactatctagactatagagaagaggaattcgataaaaacaataagaggaaaaaaacccctctctcttattttccttcatcttggtgtctttagttatcacaggaatataattatttccaactgtatggtgattaaattacttcatttcttttactaaaaggttatgggttgctttctaaaccatgcatatttatatgtacctatcaataggataatcccgagtcaaaacaaaaaacagttgcagcaggcggggtttttgacagaagatgaaggtcatatattcacttcccagatactttagtgtaagaattgggctcagacagggtccccaatggaggagttagataaaggactgaaggagctgaaggggtttgtaacctcataggaagaacaacaatttcaagcaaccaaacctccctcccccagagctcccagggactaaaccaccaaccaaggagtacacatggagggacctatagctctagccacatttgtagcagaggatggttttgtcaggcatcaatgggaggggaggcccttggtcctgtgaaggcttaatgctccagtgtaggggaattcgagggcggggaagtgggagtgggtgggtatatgggggaacaccctcatagaagcatgaggaggggaatgggataaggggtttcctgggggtgatggaaaagaggataacatttgaaatgaaaataaagaaaataaccaattaagaagaaaaaaaaaaagaaaagataatttaaatgattcattaattaaataaaatttaaatgattaaaaaaaaaaaagaattgggctcagtggggattttttttttttttttgggtgcgtgagggtggtgttctgtctgtctgtctgtctgtctgtctcgttcttttgatacatggccttcactgttggtcattctggcatagatctcactgtgtctcccaggcttacctcaattgaggcaggcctcctgtagacctctgaagagcaagcaggagttgccattcattgtctttagtttttataaggaaaaaaaaaaaaacttcacacatagtagaaaacccagtttgggtctgaggctgtagctcagtggcagaggactcccccagcacataagaacccctgaacctaatcccaaacactaaaacataacaacagtaannnnnnnnnnnnnnnnnnnnactcaggacctaacacatgctaggaacaggctgtactagagctacatacctgactatctataattcatggatatctattagggttatagctctattagttattcttcactttcagctagctctgctgtgctacctctatgtcttgcaaagattatccaatttttgtgtaattcatctccttagtagtagatgccttcagcatgttacgtgaatgtatagagtcctactagcatttaaaaatattgtttatatttctactggtcagtaaagacagatgcaacacacatgtttctgttcagatgagcaagtttctacttcaaacatttgagagatttctagaacctatgaagaaacaaagggtatgtttataaaaggggcagagttgttcactatatttttgcaggaagttcctgctgtggctaaatgcgctctactttcttagactattatagatatctcacaaaggaaaaccaaagacaaatatttgccagctgtttatatgctgaatctaaaacctccctccaatgagaaccagaccttggatgtaaaggaaaggaaaactatgactcaatctgcctgaagattgaactgccaagccccagctcctggtcacgttcatagcgatagattggaaagatccacttcattgcagtcagaacatttttatattctagtctagtattatcatcagctattctacctttttttagattttaaaaaacgtgtatgaatgttttatttacatgtatgtgcaccacgtgtccaagacagcatgcctggtatccaggaatcccagagagtattggatccatagaacttgaatgacagatagttatgacccactatgtaagttttgggaactgaatccaagtcctctacagaagcaacaagtgctcttaatcattaatccacctgtctagctccctagtattctgtcttttatatggtaaaattcacacacacacacacatatacatacatatatatatatatatatatatatatgtgaatatatacacatacacacacacaatacagttgtttgaacttaggtttaataatagaataaatggcatcaattcactctaaaataggcatcatgagactttcccagtcttgttcaaatttgggttgatatccaacaaaacagaaaaattatccaggcttaaaatattccatttcatttattctggttattggtgttactttatttgctgttggtgttttgttctttatttctgccatgttcctttgagtagatcattggaacataactttctctttgcacatagattagtttttaagaaaacttccttgacacagttttaaatacatatgattctataaactaaatgcactttatttcagatacaagagaaaatataaccttagttcaaaaataagcttttcttcaatatttgtcaataatcacatgtgccaaacatatcaatttaagatctttcttaaagctgtgcatggtagcatataacttttatctcaacactttggtaacagggtcagggaaatctaaattcacagatatactggactacacaaagtgaccttgttacaatcaatcaatcaatcaatcaatcaatcaatcaatcaagcaaacaaacaagacaaacaagtctgttttccgctcccatgtgtgtgcctgtgtgtgtctgtgcatccatatgctggaacgtaggacagagggcaacactgagtattgctccttaagaggcttctatctagtaaccatgttaactagattaaataatgaaggaattagactcatagacttaattaaattcattactaagataatatgcaaatgaatatatagagttaggactggtggaccaggtctgtaatcttagctactctaccggggagggtgaaacaggagactttcaagcttatggaccgtgtcacttatcatgactccatcttagagtaaaagacagaagagaaaaactggagatagagatcagtggtaggactcttgcccaggatgcacaaagccttaggtttaaccctagtaaaactgtcaaaaagtaagaaataggaaatagtctctacctttcacatgatacagctctatgcctttcaaaatttatagatatttataatcacaaatgagtaggacagaatgcttcacataaccattgtttataagccaaccaccattaaagcttgtatcgtggctggtttataaatggacagatataattgtatgtatgtacagtgtgatatcttgaagcacatatacatggcattagactactacatccagccacttagcacatgaatctttttacacagttactttttttgtggtggaaacaccaatagcacctttcaaggattcctaatcttgccattaattacaatcagcatgctgcccaatcaatgcaccttttgaacgtattcnnnnnnnnnnnnnnnnnnnnatcttgctcattctggctcactcttctaccactgagatgctctcagacctttcttccacaatggcgccattcgtacacaagcatctataattttgatgtagtcaatctattttttgtcattgtgacttgcccttccttttgatgtcatgtctaaaaaagtatttcctaaatcatgaagacaaaatggccttaaatactttcttcagagaataaaaaggtttactctttgtgttgaatattaacatattccacagacatactttaagtattgatcatcagagaacatatacttccccttaacactcacttgatagttccataggatttaaaagtgttagctaagaattattgccagggtacagaatatactaggcaaggaatgataatcttttactttgattaaaaaagtccttttatatctagattgttcggtggaaagaaatagtcacctcattttgtaaaaatttcatactagtcaagccagagtgaaaagtgagctttcttgttctaaaatctttgaaatttctactccaataacattcctcaaaaatgtttagaaaacaaaataacaaaacttaaaattcagttttgtattcatattgatgaggaatattagaactgtaactgacattaaatgtgccagattcaagggttctgataatgtcatagacttctctgcactgcgtagtgcttatctgacggtccctcctctgctctgaactttacgtgcggtaaaggagtgcgtcagaatgttctgaaaccatgccctgcttgttgtgtagctccagttggaagatgtgctattctgagaatcactagaaggaagaattctgactgtgtaactctgactatctaactatgcctcacacagcctaaatcagaggttttgcttgcctgacctgagttcagtcacatcttacttcaattaattctttcctcatcagatgtggagagctttccatcaagcacaaagctacatttttttttttaaagctccctcccaccttttannnnnnnnnnnnnnnnnnnnccacttagagctgcgagtcagaaaaagtgcttggcccaacgttttagcaggaaagaaagctattttaaaagtcttttgggaacatgtttgtgcaacaggaaaaaacatacaattgggttgataatagcagctcgtaaaggttagagcctctgaaaccggtttgccatcttcacagggaacgtgttgttccgcagtggcggttctcacttaaacacaggcttaattcagcaaggagccccttcctgccgacttcttttacactggaaaagtctatttttaaatcacaacccagacataatcccaggagttgatcattaaattaagtagtgtttgggatgtgcaaaattacagcagctcccagggtgtcagagagcctgtgcagcggataccgaaagcttcacacccaagtgtccgctggtgagttccctgagcatcccaagttcctcacagtgccttgtatcttcagtcacattgcctggctcgctcctgtatccttgcccttgtgtttctaggtctttatccctagagagctgggctttttaccctctgctcatatatatcttcgctgactttgaattcattaccagtgttcctcaatcttcctagtgctgcgaccctttaattcagttctttctgttgtggtgccctccaaccatagcgctcattggtcatcactcagatcctttagcctttaaaaattgaagtattattattattattattctgtagtaaaaattctttttgtattaaagatcccttatcacacatgtgatttgcaaatttgtccctctgtgttgggttgcctttttgttttcatttcctgtgtgtatgtgtgtgtgtgtctgaatgtgtgtgtgtgtgtgagttatgagtgtgtgtgtacgagtgtgtatgcatgtaactgtgtgagtatatgagtgtgtatgtgtgtgagagtgtatgagtgtgtgtgtacattgaatctaggatcttgctcattctggctcactcttctaccactgagatgccctcagaacctttcttccacaatggcgccatttgtacacaagcatctataattttgatgtagtcaatctattttttgtcattgtgacttgcccttccttttgatgtcaagtctaaaagagtatttcctaaatcatgaagacaaaatggccttaaatactttcttcagagaataataaggtttactctttgtgttgaatattaacatattccacagacatactttaagtattgatcatcagagaacatatacttccccttaacactcacttgatagttccataggatttaaaagtgttagctaagaattatttccagggtacagaatatactaggcaaggaatgataatcttttactttgattaaaaaagtccttttatatctagagtgttcggtggaaagaaatagtcacctcattttgtaacaatttcatactagtcaagccagagtgaaaagtgagctttcttgttctaaaatctttgaaatttctactccaataacattcctcaaaaatgtttagaaaacaaaataacaaaacttaaaattcagttttgtattcatattgatgaggaatattagaactgtaactnnnnnnnnnnnnnnnnnnnnnnnnnnnnnnnnnnnnnnnnnnnnnnnnnnnnnnnnnnnnnnnnnnnnnnnnnnnnnnnnnnnnnnnnnnnnnnnnnnnnnnnnnnnnnnnnnnnnnnnnnnnnnnnnnnnnnnnnnnnnnnnnnnnnnnnnnnnnnnnnnnnnnnnnnnnnnnnnnnnnnnnnnnnnnnnnnnnnnnnnnnnnnnnnnnnnnnnnnnnnnnnnnnnnnnnnnnnnnnnnnnnnnnnnnnnnnnnnnnnnnnnnnnnnnnnnnnnnnnnnnnnnnnnnnnnnnnnnnnnnnnnnnnnnnnnnnnnnnnnnnnnnnnnnnnnnnnnnnnnnnnnnnnnnnnnnnnnnnnnnnnnnnnnnnnnnnnnnnnnnnnnnnnnnnnnnnnnnnnnnnnnnnnnnnnnnnnnnnnnnnnncttttactaatctggctgatattggccacttgcctcttcaaataaaaagagtgtggctaaaatgaccggaaaatggctaattatgcccacaatggaaagattattcccatgagtaaatactccagagtgtaaaatgaaatcccaaacccaatcacaaatgaatctctctaacagctattcagctgttctgcctggaatgctcattagataagcaagtcagccactggggttctttgccttgtgttcgaactcaatgtcattcaaggctatcccagcatgccttagagttaaattaggaggctccatagccaccttgtttttaaagtcatatatatacagcattctaacttcagtagaatcacacatatatattatactatatatattactatagtaatatattgtataaagttaatatatattatactctctctctctctctctctctctctctctctctatatatatatatatatatatatatatatatatatatatatatatatgatactatttccataaactgtatacaaaaaaaaagattgctagaacttcagtttatgtaggcttactcttatatagcccaatgttccattttaattgtcagattcaaacttaagagtcttgaactattagcaattggagacccaaggagaatatttctaagacattaagaacaaacagacaaaatcagtgtcaggagatttgttttaagattttagggatatacatcattttaaaatgatttgtttaactttgtctgtctgtcttctgtgtgagtttatgattctcacatgcatacaggtacccaaggaggctagagggatttagatatcctgaaactggagtaacaggtatttgtgagctgcctgatatgggtgaagaaagcaagcctaggagctctgaaagaacagcaagtgttccttttgaaaatagtattatgaattatttgatcaatacagtacatttggatcacattcagcattcctcttcaatctcctttcagacccaccccatccccttgcccannnnnnnnnnnnnnnnnnnnccggtttgccatcttcacagggagacgtgttgttccgcagtggcggttctcacttaaacacagcttaattcagcaagggagccccttcctgccgacttcttttacactgggaaagtctatttttaaatcacaacccagacataatcccaggagttgatcattaaattagtgtttgggatgtgcaaaattacagcagctcccagggtgtcggagagcctgtgcagcggataccgaaagcttcacacccaagtgtccgctggtgagttccctgagcatcccaagttcctcacagtgccttgtatcttcagtcacattgcctggctcgctcctgtatccttgcccttgtgtttctaggtctttatccctagagagctgggctttttaccctctgctcatatatatcttcgctgactttgaattcattaccagtgttcctcaatcttcctagtgctgcgaccctttaattcagttctttctgtgtggtgccctccaaccatagcgctcattggtcatctgtcagatcctttagcctttaaaaattgaagtattattattattatgtagtaaaattctttttgtattaaagatcccttatcacacatgtgatttgcaaatttgtccctctgtgttgggttgcctttttgttttcatttcctgtgtgtatgtgtgtgtgtgtctgaatgtgtgtgtgtacgagtgtgtatgcatgtaaatgtgtgagtatatgagtgtgtatgtgtgtgagagtgtatgagtgtgtgtgtactttgaatctaggatcttgctcattctggctcactcttctaccactgagatgctctcagacctttcttccacaatggcgccattcgtacacaagcatctataattttgatgtagtcaatctattttttgtcattgtgacttgcccttccttttgatgtcatgtctaaaaaagtatttcctaaatcatgaagacaaaatggccttaaatactttcttcagagaataaaaaggtttactctttgtgttgaatattaacatattccacagacatactttaagtattgatcatcagagaacatatacttccccttaacactcacttgatagttccataggatttaaaagtgttagctaagaattattgccagggtacagaatatactaggcaaggaatgataatcttttactttgattaaaaaagtccttttatatgctagattgttcggtggaaagaaatagtcacctcattttgtaaaaatttcatactagtcaagnnnnnnnnnnnnnnnnnnnnccatatatatatatttatacataattcgacttgacattgcaagtcttgtaactgtgaccaatcacagagtgagccaggacataccgttctgctccggggagagaccaccacttgctgtccagacaacagttcccagggactgttttcagctggtgattacggaggttgccctccacgattcctctaggtactcatgatgcacgtgcttgctgctcctgtcttacaactgcagaagcctggagagatgccacagatcacaccgcctttgtcccctgctagcaaatgtccctgcagccttctacatggaatctgtactctctgccctgtttttcacttctagtgtcggcctgatagccctcccatcaaatacaacacttatactgttatttctaattgggttttaaatgccaaattgccatactgtctacataatcattttgactcctgccccaaaatgcctcatagaatttcccaggcatggccatcaccaaaatatgggttagatagtgtttatcttttgcttattttcatctatttccctttgagattgccattgttttgtagtttagaaaggcttttgtcaaggaaactgtgtggaaggcagacggacgcgtagctggtgatataactctgcattgtagttagagagatatctacgcggcagtctttcgaaacagcccagacagattcagcctgttcgtgcatgtgttttcttgcttttcagaaacaacaaaagatatttaaaaagagataaagtgaaaaagagacttagtacatatcttcagaagtaccaagtaccttaaaaccagttctggagaattgcgtccatttctttatcgaagacgtattttccaggctggtcttcacttcctgggtttaagagcataccctcatttggcctcaaggtgcggggtctaaaaatagcacctaatttttcttcctcttttaggttgtttaagtgtttacaaacaagttgtattttctgttttgattttttttcacttggagcaaaccgtgcttgggtgagcagacttttccctggatgccttggttgaaagggggtgggggtggggcgtggggaagtgctgcgtttgtttcttccggatagtttttgttttgggtagaacacactatgggaagattcccagaaagagccaggaggctgtgaagttaggaaacatttcaatgatgttaaggcctattaaacctgtcaagcgtgacagggcagttnnnnnnnnnnnnnnnnnnnnctgcgtaagtgcttatctgacgggtctcctcctctgctctgaactttaacgtgcgggtaaaggagtgcgtcagaatgttctgaaaccatgccctgcttgttgtgtagctccagttggaagatgtgctattctgagaatcactagaaggaagaattctgactgtgtaactctgactatctaactatgcctcacacagcctaaatcagaggttttgcttgcctgacctgagttcagtcacatcttacttcaattaattctttcctcatcagatgtggagagctttccatcaagcacaaagctacattttttttttaaagctccctcccaccttttactaatctggctgatattggccacttgcctcttcaaataaaaagagtgtggctaaaatgaccggaaaatggctaattatgcccacaatggaaagcttattcccatgagtaaatactccagagtgtaaaatgaaatcccaaacccaatcacaaatgaatctctctaacagctattcagctgttctgcctggaatgctcgttagataagcaagtcagccactggggttctttgccttgtgttcgaactcaatgtcattcaaggctatcccagcatgccttagagttaaattaggaggctccatagccaccttgtttttaaagtcatatatatgcagcattctaacttcagtagaatcacacatatatattatactatatatattactatagtaatacattgtataaagttaatatatattatactctctctctctctatatatatatatatatgatactatttccataaactgtatacaaaaaaaaagattgctagaacttcagtttatgtaggcttactcttatatagcccaatgttccattttaattgtcagattcaaacttaagagtcttgaactattagcaattggagacccaaggagaatatttctaagacattaaaaacaaacagacaaaatcagtgtcaggagatttgttttaagattttagggatatacatcattttaaaatgatttgtttaactttgtctgtctgtcttctgtgtgagtttatgattctcacatgcatacaggtacccaaggaggctagagggatttagatatcctgaaactggagtaacaggtattttcgagctgcctgatatgggtgaagaaagcaagcctaggagctctgaaagaacagcaagtgttccttttgaaaatagtattatgaattatttgatcaatacaatacatttggatcacattcagcgttcctcttcaatctcctttcagacccaccccatccccttgcccattcaatttctttctccctgtttctctccctgtctctgtaacctctccccttccttcctctttctctcccaccttctctgtctccctattgacccacttggtgtttctcaaacactcttgagtatggggccaaccctcagagtgaggtcaaccacacagggtcacacctataaagacatccttttttttctgccagatgctaccagttgccaagagctactgagacagtggtgaaacttcttggccaactccctccattccgttctgggattctgttagcttgagcaggtgcaggtcttctccatgctgtcacgatcagttcatatggcgatctgtcttgtttgctgatcgtcattcaccttttctggctcttacagttttcctgcctgctatttcttgcaaacccctcttaatggtagggttgagatataaatactccattcaaggttgagtttcccagtctctcattctctgcttgttgactaatagtgagtctgtataataatagtcattaattgcaaagcgagttctcctgctgaggactgagagatacactactatatggttataaagataagaacttgggagggggttacagtttattactgtgtccatttagcctaataatcatattattttctagatagtcatgccattttgacttagtttggtaccaggcatgagtttgccactactgtaccagtgggcatgctttgccaggacaatcattcttgtagctcacaggattcacagctggtaaggttgataatttcctttctcttatgctgctgtgattcccagagctaagaaagctagacagttggcatggagtcagcatcagtttgatttctctgtgttctgtcactcaggcatgtgtgatcttcatcagcagggttttaccatcatatctggagggtaatcaagagcaatgacaatgggctgttaaagtctttggtacaatcctttgagatcccactaacttttctactggatttgtcttaacacagcgtaggctgtcttgggccaggttcagctgtaccattaaaaccttagactaacacatctctatcaatgactatattgtatgtgaagcaaattggtaaattgtaataataattttactgtaaagatttaagttttgtcaaaaaagtaatgatgataaaagaaaaaaacatcatgttttgagacatttacattaacatttcccctctataatagattttttttaagactgtgaaaaaggaattctaacctgtgaaggatgaaggataatgtttatcttttgtgttgacagagtagaaatggcttgtctgatgtactacaagaagggaatgcatgtgctagttaaggcataactgatctttgcaaagcttcagtttaggatattaaagcatcaagatatgtgtgggaaaaggagcttctgttggcagctctgtagtgactgggtaaataaacaaagaaaaagaatatggctttgtgcctaaaataactcaggatatttaagaagcagaggaatagaagttggaggctatttttttcccttagagtgaacatactctttcaatattaggattaggcaactcaactaagaattaacttataacaaaaaacaaatgtaaagtgtatatatacatatatatgtatgtatatatacacacacacatatgtgaataagaataagcagtatatgtgaaaaaataagcaagctttcaggtagcacgcaaacatttgcattttagtgttctgacaaattatactgattaacatatatacatatgcatatatgtatctatatgggcagctaagggcggggtccttttcaaaattcacgaactttataaagacggaaaaggttatttcagaagcaaacacatggcaggtttgaaaattaaaatcagaagggtacattatataatgtagtgactggctagccagctgtgttttaagtaacttctgcttttttttttttttttttttaatttagcactgagagtcaaatctgtgtcttgcacaagcttgtcttgtaagctctctattacttacctaatctcttcaaccctagacatccgggttttaaaacatatctgcatttgaggacgctttttgtttctcaaagttctttctgggatgaaataaattgaaaatttgatggttgctgaggcaagtgaggagagtatttagaaacaggattgtattgttctacttgtacttaaggaagactgctttgaaagaaccaaattttccagcccttttaactttgagaagggaaaaggaatcattcataaacaatccttgagactgtaagccaaaaggggaaaatgtgcaggagtcttcccagtgccgttgtgattacagactccgttgagagtaaatggtagcttcttcaaacctgatgagtgtctttcaaacaagccacaggacacgtggggattgtactcaggaagagccttcactgcttcgctgaacccccttcactgacttgctctatccccaaatttgaaagaaaactacttactgtgtttcatagtggctcattcagttgccagtaagttaagatcagaaagatcacttgcttaagagtactagttgattaatatggaatgcattttaataaaaacatgcatttaaatgggttagatgtaaacaaacacttgcaggataatcagtcagaagaagtgtgagaagaatcaatgtcataaaaagggatacaagtcagtgtacttcccctggaatcatcttaacaactgcatctaccaatatgagacacaatctaggttgactttcagttatgttgccatggtgctatctagttacccacccatggtccatctatgactaacctaaaagatccagggcaaaaggagcgattgctccattgccccagtccattgcttgtgaccattgtcagggacactcagagaagtgcttgtaagagcaggtgacagccatgagttaaatgaccccatagactggatacggttgagtcttgtggagagaacaagtgtccactaagagatggatgattatcacacaaacttgcttctgtaatctggacagagacaggggttgatctggctgctccactgaatgaggcactcaagtggaaagcgcagccttttccctcggagcctgttttccagatcactaaggacggcgcgatgacggaaagctagaaagtggagctattcgcagactaattctttggttattgccgccaaagatgacttggcaactgctcagataactctcactaagatgcctttttagagctccgaggctgaaatctagtagataacaacaaaaataagagcagtgtcgggtagaatgttgtgtttggggaatctccaaacatgattttgaagcactttgccttgaagggtttagacccaggacataatgaaggaaatttaatctcaccgtgtgtggaaatcatcaaagcactgttttgttaaaccagtctgcttcccaaacagaataatgtttatttatattccgattcatatatatttttacatacaggcagaggactatgttttaaacatagctcccagtgttttattattattatttattattattattattattattattttttttttttttaaagacagtgtttctctgtgtagccctggctgtcctggaactcactttgtagaccaggctgcctttgaactcagaaattcgcctgcctctgcctcctgagtactgggattaaaggcgtgtgccacctcacctggctgctcccagtgttttaaatttgcttaatctagatgcagtccaaacttagtggactactgcttgttcgaccccctggcacctgcagttttgaagactaaatcgctttcatcatcttattttgtaaaaaaagtagaggtgcttgtatgagcattttatcatcagaatttcattgtcaatgtagatcagtagttctcaaccgtcctaatgctgcaaccctttaatacagttcctcatgttttggtgacctcaaatctttactataaaattatgtcattgctatttcataattgtaattgtgctactgttgtgaatcataatgtaaataccggagatgcaggatatctgatcaggccacatatcagatatgaacaggttgaagaccgttagaataacctcacaataaaaagctttctaaaataagaaataataattgctatttaagnnnnnnnnnnnnnnnnnnnnactgcttgttcgaccccctggcacctgcagttttgaagactaaatcgctttcatcatcttattttgtaaaaaaagtagaggtgcttgtatgagcattttatcatcagaatttcattgtcaatgtagatcagtagttctcaaccgtcctaatgctgcaaccctttaatacagttcctcatgttttggtgacctcaaatctttactataaaattatgtcattgctatttcataattgtaattgtgctactgttgtgaatcataatgtaaataccggagatgcaggatatctgatcaggccacatatcagatatgaacaggttgaagaccgttagaataacctcacaataaaaagctttctaaaataagaaataataattgctatttaaggtaaaaattcttaagagtaactttgcttttctaaaatattttgttggttaattcattcatttattcatgtattcagtaaacatttatgagcttccagtcaggaaagtgccccgatgacccagatagaagttccgtctttgaagagccatatcagcaaaagaaaggagaatagaagacttacagtaagaatgcactacagcaagagattgctgaaaaaaagattaaactttgatctcagaggaccttttgtaggtctagtactttaaatttatataaataaaataattcagttctattcttcaatgttccaattatcctaggtgaataaaaagtagtatgatgtctgagaacaaacaagtttgaggttccacagaaatttgctatatctggacgctatactgaaaggcaaactagagatagcagagaatgaatagaaaaaattgtgagctaatatttttatggagggtagccagtcgtagaaaatagctcttgcattagctctgtaaccgtttatttagtgttttatattgcctattcgtttgtatgtgtgtttttgtggtgggggaggcacttgtatgacatatggacagacactggaggactgttagcagtggtttattcttgcattttccctgtaagtcatcaggccatttgtcttggtgggaagcagatttacattctcagccatgcttctggccttttatttatttactttattagaaaaagattctttaatacttaattacttcagatactatgtaaccaccaaaaatagaggcttgcaaatttttacttataatttgtttacttataattttacttacaatttaaatattaatcagagcgatgaattgtctttccatagtttgaatgagaaaatgatgtaaaattaatcattattagtaatgtgacacgggttgaactaatgaggtaaaggtaagaaagatatattcacccaagtatagtatacagtatctataaagttcggttcctattaatctaacacataagtattgacatcttgcttttatgtcaggtaataactgcaatacagtaagactggaagtgggtcataggtcaaactgcctgggctccaatgaatcattaactcacgaacaattccaggaaacctggagttctccgtactgtacccagctccagatgaaacatgttactttgtgatggatagtatactgctgtaatcgaccttccttaaccaacatcctaataagttatcattgccatgataagaagagctttgaaaagcctacatgcaatctttgtcttcctttaatgcaatgcatgtatctctctcaccccagaaaactgctttcttctgttttttaaattttattttatttttttattggttctgaattatatttgaagctttactgacaagcttagaaacccacacccattactttacagcagaatgattgaaagcacttataaaaaccacacaaagatattaagaaatacagaaaaatctactcaagtcataattacctaaagaaaatatattaacaaaccaataaaaaacacataaattcatgttcaagacagatgttttgattatgttcttttcagacagggtctcactgcactgccctgtttggcttcaaactcccagtgttaccacattggccttgagctcagagaaatctgcctgcctctgcctccagaatcctgggattaaaggcatacatcactaagccttgaaacattttccttgaaaatataactactttgaaaattacttactcacaggaaatatgaaaattccaggccaactgtatttttctataatctataatttatattgaaaagtttcatgtagtgactgacatattcaaacattataaacaaaaaaaatggtacatttgcacaatggaatattactcagctattaaaaacattgacatcatgaaatccacaggcaaatggatggaactagaaaagatcatcctgagtgtggaactgagacccagaaagacaaacatgatatatactcatttaaaagtggatattagtcataaatttcagggtagccatgctacaatccacagacccaaagaagctaagtagcaggtagggcccaagggaagatgctttattctcactaagaagggaaaaatcagatagatttgatatgccaaggcgggttaatatgcatggaaggtctcctctcctctgtggagaaagggagcagggtatagaaggatgggggtgagagtgagggactgtgaggagaggagggaactgaagttctcatcaggacataaagttaattaattaactaactaattaattaattaatggaaaaataaagaaaaagaaaaataacatctactcaatgtataagcaacgtattgactgaagaaaataatctcatcagcaaccagactttctagtccaatgctcagtcataaatttgtgagtcatgtttcttctgcctcgagtagttctgacttctggacagattagctcagctgtatcacacaatcatttgaatcaagtactatttgattcaaacacgtggatccattattatgaaaatcaacaatacttgataaattttttttttataaaaagaaataaagtaaatgctactgagctactaattgagcaggactgggaaaaatctactgtatatttaagtgttatgcatactaaattattttacaaatatcaacatgtttaaaaataaaatacagggatagataaaataagtatgtgtatccttcctggtttcaggggtggggatgaggttctaaaagtcaggttaaagattatgtttctcagtatcacttctgtagttcattaaaaattagaataactcaagaatgtctaattttagtagaggtattgcttagaaaatttcggtttcctatggaaataattatgtcttgttaacatcatattaaattattttaaatctatccatattttaggtcatgacccttgtaattaagaaattcttgaagacaatattcaggagaaaatgtgatttgagtctggagacaattgtgtatgtaagtatttggaaattagattttccaggggtgaaatctaattaacaactaaaatatcattaaaatttttttattcatttaaattttttattattagatattttctttatttacagttcaaatattatcccctttcctggtttcccctccaaaaaccccctacccctacgtgttctcccctccccctgctcaccaacccacccattcctgcttcctggccctggcattcccctagactggggcatagaaccttcacaggaccaagggcctctcctcccattgatgaccaactagatcatcctctgctacatatgcagctggagccatgagtcccaccatgtattttctttggttggtggcttagtcccagggaaaataatcaatttgttagttactaaactgcagaaaatttgcttcacatttttcaatctagcactattttttaagatgtaagattaatagaatccttcctgattttcaggtatacttttcttaagatattaaaaaacaaatccaaggtcacaggttgcttattgatagaagagaaacaatacggatagaagagaaatcagaaaattgcttatgattgacaagaacagctgcagcagctacctaggtgagtcacagcgggcaaccagcggagcatattcaatcacaagagtgacggagcgctctcaatatatgtcacaaaaaagcagaagacctggggtcatgtggaaaggggcttcctaattttattctgaaaatagctatgctttgttttctgacagaattcaatccaagttcattgttcagtggtaaatatctactgaagagttttttggtttcctttaaaattgatattgctacatatcaatttaaatgtgtattatgttcagtggctatatcatggcaaccacgagaaaactagtgtgttagaaagcaggctttagggacatcagttccacagagtctgtttcttagtattcagctggcagatggtgtttgagaggccattttttaccagcttagaatgtgatctaatattagattaacatatgcatgttactgttcaaccccagagctttatttccacaatgtagaagactttaagaatctttttattttctgattaatttctgtattaattacttttcttatcgttttaacaaaatacctatgaggaaacaaatgtaaagaggatttatctttgctcacagtttaaaggtttaggtcaggttgtcaaagaaagcaagcacagtacagacttggaccatgtggtcactctgggcctacaagaagcaggctgcaatggctgctcccattctgcttacctttccttctttaatgagttcatgatcccaggccacagaatgctactgtccacagttgtgaaggtcttcccatatcaactaacccagtaagacgatcccttatagtcatgcccagagactaccttaatatgcataattcctcacagatgtgtctcctaggtgattcaaaatctgttttagaatttgggtagaattataacagatattttcttttgaagcatatgttagtttcatgagtattgaactttatttatttcatttttgttatagcttgaacatacagcacatttcatttggactctaataatggataaaaagcatatactatgttttctggttctcttgcctcttaatatggtaagtactcaccctacatatttattcattagttatgaccatgttttatttacaacatgcatcttattggtaaaagttaataaggacaagctaagtagttgttagacgagtaagttgatttcattttttatatccaattaatacagcaataatccacttccttttagtattttttttttatactttgaactttttaaccaatatggtttgttgggtccttggaaggaggttgggatgtcagtggattcaaatatgcaaaactcaaaagtgataaagttggaaaaatactggaatgatgctttatagtagtacaaatatacacagcacataaaatatgtttacagaaacacatagattcagaattatctttgaaaaaatcatattctagtctttaaattttttattttggtctaccaattgattggcatttatcaattaaaaataactaggagacgtactgcgttttatattggttttctcattcattaataaatcactcgttcaaatagatttggatgctaaatttggggcaaatatgtctccatatgggtgcacgcatccatgtgcacctttacatgcatgtgccagagatgtgaagccagaggattaacaaaacccaaagagctacacgcttcatagttacttcttatttgtagttttgtttctcttcatctttttctctgcattgaattaaagcaatcaatattgctcttctctttatacatagaagaaacccagagacacactctcatctaattctgtgccagcaactaactttcctgtggtgtttccaagcaaaaccctcagaaggactcaaacaaaggaaaatttaaaaagtactgaaaacttaaatgagaaaaaaaaccccgccaatatcatatttctgagagtatacgcactggaaaacaccttcgagtctagaagctgtccaatgtctgcacatataagatgttatcttgggtaactgactagacttcaaaagacagaactgtttcttctgctaatggcacctgttaagtgtgccagcaagctacacgggtcaccatgagttctctgcagacgacactgtagtagttcaccagctaatacagcacagtgtaatataaggaaccgtgaccccttcttttgaatccattcatggacagtgggcaaatatatttggaattattattactttgcttagtttctatcaaaactttctcagaaaaaatggttttatgtgcatttttttctaatattgtcctgggataggcaaaatgtttgcttagcctacatgaggcactaggttcaagccacaacattaaagaataaattcaaatgacttaaaaatagttttgatgttctcgaatttcatttattacttcacagggtgactgctttctaagcctctcaggaaattcaagcctaccaggaaatacatctgtattattgctaatgaggcaatgtgatgccacccagtgaggtggcaaaaattattattttgacattgcaaatgtacaaagtttgattattttccatgtggccagtactccctggtatctggatgtcatttgctgctggaagtagtggtgcatagtttatcgacattgaaagagcagataaaccaccaagggattctagatacaactgtttgtgttttagaacaaatgtttaggctgtgttgttgtcagtcaagtaccacagactttgggagccaactgagcctctcggtgctgacatctgcagcaccctgaagggtgtttgaaactggacacagtaagagtttagactaaggaaattggcagacacaatgcattgggggtttccttaggagagtcattttgtatccaagcaccactgctcttgctgttttccaccagcaagaaatttaaccattccaccattctaaagccgttgttgttttattccctcaggctctcatctcagcagagtcggaagaaggcgtgaaccaaacagacttgggagtcactagaaacaagatcatgacggctcaatatgaatgttaccagaagatcatgcaggaccccattcaacaagcagaaggtagctgcaactaacactagatgtacctaacatgtaattaaaagaaagctatctgtgcaggttcttacgtctactaataaaaattaattagttgcttgttttctggtttatgtacaaattttattatgcatttgtgaaatgtgttttatgacatgatccaacttattcttttttttgtttttttgtttttttttcttttttgttttttgttttttgtttctcgagacagggtttctctgtggagccctggctgtcctagaactctctctgtagaccaggctggcctcgaactcagaaatccacctgcctctgccttccaagtgctaggattaaaggcgggtgccaccactgcctggctagaaaaattttttaaagtgagattaaaaaaccaaatgacaaaaccatagttaatgggagcgattttgttcataaaatgtttttgttttgttgtttttgagacagggtttctctgtgtagccttggctgtcctggaactctctctgtagaccaggctagccttgaactcagaaatacacctgcctctgcctcccaagttctgtgattaatggtgggcgccacaactgcccagctcaacttattctttttagtaaaatctaacaaaatacttcatccactgaagttttcagaatgatcctttagaaggggtaaaaatattcgaaatactaacagatattaatatatttaaaataagacaagtcaataactattgaccatcagttcatgtaacttataaatttatctttttataaaatactttgtttaataaaacttgaatgtgactgcataccaattctatgttagctggcatcattttatttgatattattattttaaaactagtgaactaactctttgcaaatgatctagataaaggcttaagtactaaaaaataatgttgagcaataggaaaatatttttacaataaaacaattctgtggtaaaagttcaggatcactgtttattttatctcagaaccttacaatgcattttgcaatttgtaaaaaaaatacttgagactaaattacctttcaaaaatactttgtgtgtctgaaatctatcttaaagatatctatctcactctgaaaccacagaacccagttaaaaaaagagacattgtgatgcatcacgctacccatgttcaagtgtttcacacacagacttttctaatggcaacttggacatgaataatataatttctaaagaaatacaagtattcttctatagatcacaattattttacaggccatgtatgataggaaacattttaaatttatttaagatgacaggaaagaaagctgtggttgttttagttgctttttaaaggtttgtaattatttagggttttcagataccagaattgttatagctcttttggggctaaaatggtcacaagattgttgtatagacacatgattattaacaaatatttcgccggttgtggtggcgcacgccggtaggatttgctgaaggaggcagaggcaggaggccagcttgggctacacattttaaagccgggcgtggtggcacatgcctttaatcccagcactcgggaggcagaggcaggcagatttctgagttcgaggccagcctggtttacagagtgagttccaggacagccagggctacacagagaaaccctgtctcaaaacaaacaaacaaacaaagaaagaaaacccaaatatttcatgtaaaagtcaatgttcaacttaattttgatgacttagagattgttataatttttgattagatatttttagaacattgatgctgttttgatatacatatcttttattatgcatatcttataatatgtaatatataatatattgcaaaagcctctttatccttacattgattgaaacaaagaatgatcatgtttgaatgttaaaatagtaatgttgactagaaggtatttgttttagtaaatgctcaaatattttccttaaaaatacagtttctggcctgcggtggtggtgagcacttttagtctgagaacttggaaggcaaaggcaggttgatctgtgagtttaaggccagcctgctctacagaggaaactccacggcagccagggctacacaaagaaaccctgtcttgaaaaagcaaaacaaaacaaacaaacgagagagagatagagatagatagatagatagatagagagagagagagagagagagggagggaggaaagaatatagtttctaaataaaatatgctttaccttttggtttaaaaaatttaatacagggacactaattgaccactgcctcatggttaaatacaatcaccaaggatagcctgatttattgaacaattgcttcgaagaaattaaactgaatctaatatttatgcagagtcatatctaagtttggtttgaataccattgataataatccttaatagttgctgtagtgattacttagtgacacaaatcaagcaactgtggcttttatacaccttcatttccaggagacttctttccagcaaggcactgagaagccttccttagccgggcgtggtggtgcacgcctttaatcccagcactggggaggcagaggcaggtggatttctgagttcaaggccagcctggtctacaaagtgagttccaggacagccagggctatacagagaaaacctgtctcaaaaaacaaaaaacaaaacaaaacaacaacaacaaaaaagttgactcatgagtagccacagagacttgctgacccttcacttttatttcctctctcaggcctttactgcaataggacctgggacggatggctatgctggaatgacgttgcagcagggacggaatcaatgcagtactgccctgactattttcaggattttgatccttcaggtagagaccagaatttaattacagatcttactgaaatctgtaaagttaacattgttatttaatatttataagtgttattaaatattaaagacatgttattaaatgcatttggaacttgtcacaaaatagcctcaaaagattgcagtatataactatgttacttttaactctctactactgaattcctttaaccaaagggggggaaattgaacagaaactataagtttatttaactctttttattttatttttttattattaaagagaaggttacaaagatctgtgaccaagatggacactggtttcggcatccggatagtaatagaacatggaccaactacaccctgtgtaataacagcacgcatgagaaagtgaaggtatgtaaccagcgtgagttgaaattggacttacattttaaaatcagagcaatgcagtactagaaaaaatgcagtgttccattccacagtaaaactgtttcctaatatcatttgagaagaataatgaaaaagaacctgtggaaaaactgctattaatgctgccattacactaggaaagtaaccctgttagataactgtgtatttataagtcaatgcctcagaatcagggtggattctgattttccaaagaaaatatatcttaaaagtgtaatataagggaaaactctcatttctagtgaaattctagaattacctcaaaaattgttcttaggcgaacaggatatgctcagtgggatttaaacctccccctgctcctcagtctaactggctgtgcaggacactctcactcttgttcctgtgttgaaacttaaagccatggctaaggacaacggtcacagaggaaagcgtgattgcgatatttttatgtatttgcagttgtgtgtgtgtatgattgaaagtgtgaacannnnnnnnnnnnnnnnnnnnnnnnnnnnnnnncaaacccaaacccaaccaaccaaacacctaacctaccaagcaggcaagcaagcaagcaaacaaccaattaaacaaaatctctataaatggtatgttaaaagaaaatagaaaaagaaagaaagaaagcaaaaactaattgaatgttaaaatacattatatagatcaaaggatcttttaaatttccatatcaagatctgtctctgagcctcaaatttgtgaaaagaaatagcaaaacctcaataggtaaagaaagccttatcaggtatttaattttgagtaaactaaaccactgagtattattcgattttgaatatataatgctatacagtataaactagatcaataaatgcattatcttaaagattcaatgtgacttctaattccttaaataagagaatatgtggcttataagtttttaataacatttagcaaatttgtgtagatatttttcatctacatattttaaaatatttattggttttcaagcaagtgtttgtaaatctctctccatgtgcttttaaaagtagaatctattaatttgaattttatctaatatatatgtagatttttagatacagggttcattccatttttttttcttaccacacaattatagacagccctgaatctgttctacctaactataattggacatggattatctattgcatctctgatcatctctctcatcatatttttttacttcaagtaagtacatttaaatcttttttaatttgacaactgtggtgaattcagattatgtttatagtgagctcatgtgaggacaatatatataaaatataagtaataatattaagtttaatacttaaagtaaattggggtattttttattttattttagtttcatgaaataggcagggtgcaaatggactatcttaatcctaattctataaaattattaggcatataaaattaaagtatgtgctttgatcatgttgatttagagggccttgttttcttggtatgccccatcacctctggctctttcttttagcttcttcttacctagagttttctgagccctgaagggagggatgtgatagagacatcccatttatggcttagtgttccaagttttcattctttgcataatgtctggctgtgggtcttatatttgttcccatctgctgcaggcggaagcttctctgataatggcggaacaaggcactgacctatgtgtattgcagaatgtcattaggagtcatattattgctactttttatgtgaagaacagttttaagaacatttggttttgccttcggtccctgggctatctactctcaggttcttggtcatttgtgcaatgtcatatatgggctgcacctcatggagtgggccttaggtcaaatcagatattggttggttacgcccacagtcttcatgccaccttgcactagtacgctgtgcaggcagggataccattgtcagtcaagtgtttaattttctctttttgtgacatgctgaatgctttcctatgccaaagatcccagaacatagggatgaaggttctctgtaggcactatattgacttgtctatgttcaatgagttgtgcagatgttgtatccagcaatggggccttgctgtcagtttgtggagagaaatctgtagtcttgacaacagcctggattgtttgggggttcccatgagacactttgggccaacaactcaattagatgtaatcaatcccagcactggaagcttcatttggagacaagagatggctagatggggttgcctcctctgttcttcggcaatttgatttagattgccttgatatatgtatatgttttaggaagttcctactgtatcaggtttccttaattgtctctccccatattccctttatctccccctttccctccccatacatacttgatcttcccatcccagcacccccatttgtccatagctctctattttatttccctttcctagtaagatttaatcctcatccctccacgtcccttactctataactaatctctgtgtttctatggactgttgcttgtttatcattgacttaaacagctaatatctacatataactgaataaatattacattcatttttctcagtctgggagacctcactcaggatgatgtttttctagttccatccatttacctgcaaatttcatgatttcattaaaaaaaattttttaaatccattgtgtagatgtaccacattttctttattcattcttctgttgagaggcacataggttgttcccaatttctgactcttatcaattcagcaacagtgaacatgtctgagcactaaatgcctctggggtagaatgatatttagcatatgtccaagagtgatatggctggatcttgatgtagattgagtcccatcttcatgaggaactgccaccctaatttccacaatggctgaaattctcatatgtgtgtgtgtgtactgtgttccatgggcaaatcttgtatgcataggggccagaagaggcattagatcccctgaaactggagttacagatatttgtgagcctttacataggtctgggaatttaacctggattctctacaagagtagcaaattctcttagacactgacgcatctctctagccccagtttttacaatatattttagttttattatgcaaaccttttatatttttcaaagccttgcaatttcttggtcaaatatatgtgtttttgtgcttcttgaactagagcaattcaaaagtctcctaaagcaatattctcagaatgaattcatagcatccagctcttccaaacctaagatagatttcttacaaactaacccatcttcaccggtgatgtcaccagaagctcagttgcattcatcagaaatttagcaatattttgagagtccattctccctttcatttctccttataggccttttcatatcctcactaaatccagttttaatcatctctgacaccattactactaaatatgtcctatgtaactttaaaaattattatttcttatcagggactcactgtttagaccttgctggcccgaaactgtatgtagacttggctagtttcagactcatggagatctgtcttccaaatgttgggattgaaggtgtgttccaccacacccagctgctattctaatggcttttaaaaatcagtttactttattcaactgtagacaatctttaaaaaaaaaaactgcatcaaatgcagagcttatttgttattctctgcttccaaacattagagtacttcttttttttttctgcaccttacatgaacatgaaagtgttaatgaatcttgcctatcattttctctgcctccctagcctggttaaatgcttcatatctgggaattttactggatcattttctcagtggactcttcctgaattctttactgaagctgtaattaattacagtggccatggtgtaaaaatttaaaagcatttgagagataataatctctttaaattaaaaaccattccagctgagacacttcagattaaactgtctctattttttaatgtaataagccaaaacatccaagggcattaagtttctgaaggcgataaagttaatagcaattacattgcattccaaaaccagtagtaagaaagaaaacaatggtctcctggaattctaggccatatgccttcatgcaattttgatttagcaaagatgtcagtaaagtacccaacaagtgaaaagcaaaattaatactacttccgcatgtgaaaaaaaaagtcccagagttaataaaataaatgctcactgggcttatgaggcaagtggggccgccaaggcaaacaatactgaagccaaactggaccaggaaaagtatagtatcagtctaaatctctaatcagacggctcattcattcagttctcaatggagaaacactgtcataataaatggcttatcaaggagattggaaaattaagggaaacaatagctatgttgatcaaatcataacagtacaaagaatgttgttataaggggttagggtatacagtgataggagcttaacatcttaagtacaaataattataattaggaatagagagtgtacagtaacaaagagaaataggtggtttaatgtgaaaacctcttattttttgcctttttattagatattttctttatttacatttcaaatactatcccgaatgtttcctataccctctcccccgccctgctcccctacccgcccactcccacttcttggccctggcattcccctgtactggggcatataaagtttgcaagacctaggggcctctcttcccaatgatggtcgactaggtcaaaacctcttaacagctaaacaaaatgtaatgaactcgtagttatcaatagacctaattgtcactcagacagaaatcacatactaacccatcaagaatattcacacggcagatcagagaaatgactcgtcagtaaagtgctctctacataagtatggggacttgagtttggatcttcagcattcatgtaaagaggtgggagcaggaaattgatgcctctaatcccagtgctggggaaataaagaactctatggtcctgctggccagccaatctagccaaaatggcaagctccaggttcaaaggaatatactgcagaatgtttgaggaaaatgtctagtgtcaaccggtggcttccacatgcacaaacacatgtacttgtgcttgttcccacacgtgtacaacatgctgagcacattcatacatattacagtcagttgctcttattttgggttggtagctggaactgaggacttacaatgctctttcaaagcctaagaatctgtgaccagagaaggattttgtcatgggaattagagtgagctatgtttaagtgaaaatatgtaacagaagctggtacttgtgaaaatattttcatgcaaaagaaatttattgggtagctatcattgatatgaatttgaaagaatttcaggcttagtgttttgatgtctttgcttacatctgttttattctaaaagtaaataccattcaaccaacatttaaagattaagacttaaaacctccaaactatctatggaaatcattttttcaaagctgaactcatatatttatttaaaatacattagtttcaaagatacaataggcagctacaaacctcattccccaaaagaacagaaatttcatattgtccctaattctcttctcctgttttgtaaataggtatctcattatgctaagtcacaaaagattaagattatttatagtgttataaatataatcccttgagtctaaataattaggaatagagtttgtataataaaagaagaattcaggtgttggtaatgcacacttttaatctcagtgcttgagagtcagaggtaggcagatctttgagttcaagaagaaattatgtggctaattaaaaagtttctaggaaaaaaacaattgaaaaattaaagattactatgtaataaatacaagtacttgatatttgctaaaaattttgctcttaaaaataatgatatatgtggtgtgggctggggaagacacccagaagcctgccagccatgtggtccacccactgcaatgtgcaagtatgtgttggagatatgggagcaaaagagaaacagacaggtttaatcactgtgcagagagatggaactggagactggagggtggagagaaacagtcagatgggagttgtcagccctgccatctgagaccatggtgaagttatggcttgtactgacactgagggccatgtctgagtctgtgaccagcagcaaggggctgtgttaatttccatggctcatattactactaaagaccatgtggacatctttgtctgggctgctacttggaccatgctgatgcctaagggctatgcagtgctagcctggcctctcactggctaaggcgttctggacggctggcccaatctcttgtttgcggcagcacttgggagaggatcctgaaccttgcttaggcagtgcggtagagctgaagttggtgatgggattggggttgacctagcctgaagggcatgagcacaagagagctggccctgtcattcctctgctgtgtgagagagagaggccctatccccaccttgactccttggcaggcaggagagttggtccaaggtcatgagggtgggagtactgtcccaaccctcactggctgtagcactcagaggagcaggccctgcaccttgcctgggaagcacaatagagctagccctggtggcaaaggctcagataaggtgccctgagggtatgagagtgagggagctggctcagcccctctctgactgcagcattggttgagcgagccagggcagtgctagaggtctcaccctggtggtgtgactgtgggagagctggtaggttgaccaactcagctaccacccaggctcacattcagggctttgagctggcccatgcccacatctactcaggtatgaagggctggagtgcatcagagggccaatcctgcagatccaaagctgtaggatctccatgacacagagctcaacaggatatctgagaggagttccagagcggatcaagtactgatagtgtatagcagaagccagaggctcgaaccaaaccaatgactcattgcaatgaacattcacaagcaaagatgtgtgatcagaagggtatactgtgggacacactgtgatacttcagcgtccactgcgagatagtctttatgcttttttttcttttgggtagggaggttgcaaggttgtaagacggatacgaagggattgggagatgaatgagattgggatacataatgtgaatctcacaaagaataaattaaaaaattaaaagttatataatgcacataattaaaatcttattaaatcaaatgaatcatttaacaatttaagaaagttggttcttggcctctacaaaaatattaaaagactgcaaataattactttgcttatacctaatctttatactaaaattataatgaactgtttatttattggactttatttaaaaattatcaaacatcttttaattgtgagttagtatgacaagcacacatttgaatctgcacataatttttaaataaatggaacaagactgtttaaaagcatgggctatattttaatcttcatatcaatgcttactaatagtgtgcttttcgcccaattctggttttatttttattttttatttatttttttttccaattctggttttaagtaagctcaacgttttcttttctttttttccttttttttcttttttctttttttttttttttaaagtgagccatttgttttaagtagaccgttgtgtaacagaactttctctggggacacactacatattcatctactcaccccagatacagagctcatgacagagcaaagtatgaataccactaaagtctaacttggtgaaccagtgagttttattggagttaattaaaggaatatgggtgaggagttactgacaggagcagaaatgactgacagatggctgcatcaccaaggaccacatcaacacatgtgacagctcacaaagctgggagcctggagcgcattgcacagtctgctggcatctcagcaggttggagagtttcccttccaggtgcctcacttggtctaaaccccttccacatagttggcctggttactgatttttccaggcagttggtttgatctcagagtcttctttgcagcttatcttctttggagggttgatttcaactggtctgagagaaactctttttttgttgcttaagctgtcatggagggggcctagtgaacatgatgagtttcagggacttcctgaggccttttgagctgtttacctttctgccagaggagcttccctgctaggtggaatgtttctatcttgtaggaaactgttagacatcatagactcacacagtgcctggcatttatgaactgtccagaaaacaatgagttactaattcacttgggaacacaaactaactatatttctgtaattacccagcatgtttaccaagcaaatttttctgatttttaatttttatttttaaaaatatttatttatttacactccagattttattcccctcctgtccaccctaatttttaaaagtattaatgcagagctacaaagacctgtaggaacatgaaggaagaaaggacccatgtgactcacaagtcagggatttgtgatatgatatttccactgaaaagtatgtttcttggatgagcagaatttcaaaaggtagaaaatgtaaagtagtaggcataagacactgtctaggctaattcttatctttacttattttccagtaaagaattaactcttcttctcaatctgtgatctttctgttcgccttagctatttcctttgacttgaacattcttgaattatagtttgaacagaaagaaacaaaatgaaacaagacaaaaatatttttcctttgctattaaattggccttatgtgaaatatgacaaatgctcaagtaaggagagcagaaaccactttttttttgttgttttggttcttcacacatcttaagccccggaatagtatcttgcacaaaattggcactcaataaccatttgatggatgaagacataaaggctttgcagcttccatcaaggactgacttgtccatgcatctttaacttctgacaaattccttgaggtttcctagtcttaattttctccatcaagaaagaaagaaattagatcaggactctgaattctgatctgtagaagtatccaaggaaaataagatggtagactatagataaaaaaaaaagtctgtgcatctcaggaattcctaggtttaaatgctgcatgaagcatgttcatcaactgtcgaggatgatagaaattattagtttcatgccaaataacctggaaacaatttctagaggagctgatgtttcagataaaatcactgtgtgtgagaaaaatccaacatcttccttctgcctcttagcccagttccttctattgcagccttcttcagttagtctttggtagaagaaactcttttccccactttggtaaccaagggtcactgacccaccctcataaaaacccagaactatacacaatgttgatgtagggtactgtttgttattttttgtttagacagggaaggcaacaattctctactcatctatgctttaaattaggaacagagaacacgaaatgctcttcaccagatagatttgttttatattagagccaattaaagtaaaaagtcagagcaggagaataaaagaaagagaacagaaagggagggggagatacagagccataactttggggttttccaagctctcagaggcaatcacttactcataacagtctttggaaaaacaaagcagaatcctctagataaaaaaaataaataaactttactggaattagttacaaattatgttttaattactgtgcaaaaagctgaaagcatagcaaacctgccttttactttcaactcagataaaaggcttgcacataaaaaggagcacgcagcatctatctgacttgtcagggaaatgtgggtttttttttttttttgtttttgttttctccttaaatttgctttgatttcttgaaagaatatctctgctgaaattttacatgctaattttaacttcttttaaagcaagttgcatatttttcaagcatgtagaaatgatctttctaggttattgacatgagttccaaataaaatacagcaggaaagaagagatcctgttggggagtcaagcattctcaacttagtgagatagccttacagtgctcatggatatggttgtatgctttgtgcgtatatgtttcaaggtgaatgacccaagctcttacctttattctcagattcatctaaatactttcaatcagtgtcatgaacttttaaagcaggtatcgtttttccttctagccatacttttcctacagaaatcttatataattcggcctttaagatagctgaaaatcaaaggaatcctatgttgagtcttttcccacagacaaatttgtctggtaaacttgactgggaatccagaaccatcacttgaacgtgactcatttgttgacttttgactttgcctttgatctgttcaggagtttgacaagggctgagttcctaatcacctagagttgtttgattgcatgcctgtcaaagcccacacccactacagccttgctttccaaactgttgtgatctatttgttctttgcaacttttatgtacttaggttaactgacatgtcatatatatgcaccctctgcttcctttagcttagcgttgcatattgtttacctaagtgtgtttctcttagtattgtttatcaactcacactcagtctatctccaagttgtagtttaatcaggattttgaaaactgtgttcctcctattcaatgttgtgcaacatcaaaccaattgcattacataatatgagtcagagttgcaaaaaaatcttcaaaatatatactgaattatgtaataaaattgcattttcacattagagtaacagatttggataagggcaacacaggtcaagaagtagtagattttactcaataaaaactgtttcaattctaaaatatctgttggtagtggctaattgaggagagtctcatgtatggaaatataagtaaataacctattagaaaattgggatttttttttaggaaatagttgtatgatttgaaactacatatatatattaaagataaatgtttattgatattttataaatattaatttctttataactttattttatatagttttttgaaaaagtaaaccaaaagggtatttaattgtatctaaattagaataatatatagaatgatacaaaattattttaattaagctggcaaaccattgcttgccatagaactatacagttatttaaatgcattaaaatgttgtagttcaaagagaacatgtaataaaagtaatattattccagaagtgaatatatgtgtagcctggtcttgtagtcttgcagacataattaatttattttcttaacccttgcacactgcaccctactcagaattgtatcatcattttagaagttaggaaacaaagcctttgagcgactagatactctactgcgactcttgcaggtgaggtactcagatgtcaaaaaaccaagatcttaaagaagatgaggataattagaaaagtggatatagtaaataaatatatacatacttagaaattaaagtagaaagcagaaagataaaaacaattgactgaaatcttccaggatgaaggacatattttgtaagttaatctcttaatctctttatttttttcacctgtgcaagggtgcactgctgccttacgctttctggtcttccttctttccctcctcttcctctttctcctcctcctcctcttcagaacatcaaattcatgacttaactaagggcatcttctctacctaaaatccatgtccctgctgctgtctccttgttgggtcagtcctgagtgtgccatttaactttgaccacagtcttagtattttttttctttctttctttctttctttctttctttctttctttctttctttctttctttctttctttctttctttctttctttctttctttcttccttccttccttccttccttacttccttccttccttccttctttctttctttcttttttttttttttttgagagagggtttctctgtatagccctgactgtcctggaactcactttgtagagcaggctggcctcgaactcagaaatccgcctgcctctgcctccagagtgctgagattaaaggtgagcgccaccacgcccagccaagtcttaattttttaaagaaaagcacaaatattaagaatgatgacagttcatgtgtctgtttgcttcccactgtgataaaaataatatattatggtcttgctctgaggagttctcaactgtttacccagaatctagaaagagtggccagcagataaacaacaaatagttactaattggatataaagtaaataaaactcattgcttcctccaaactttctggttcaacaggtcacctactacatggatggccttgaataactttcttcaattttattaaaagataatgctattttaagaggttaagataatgagtctagtttgcttgcatacatgcctgggatatattagaaaacccaataaattatgactatatcattactgattttgactctaaaatgcttttgcttatttctggaatgcaagaaatacaaacattcaaaagactgttttctcaggacccagatatagctctctcttgtgaggggcctagcaaacacagaagtggatgctcacagtcagctattggatggatcacacggcccccaatggaggagctagagaaagtacccaaggagctaaagggatctgcaaccctataggtggaacaacattatgaactaaccagtaccccggagctcttgactctagctgcatatgtatcaaaagatggcctagttggccatcactggaaagagaggcccattggacttgcaaactttatatgccccagtacaggggaacgccagggccaaaaagtgggagtgggtgggtaggggagtggggggtagggtatgggggacttttgggacagcattggaaatgtaaatgagctaaatacctaattaaaaaaagagactgttttctctccccatggttttttcccactagctgacaagggaaagcatttgtctaacagttcacagataagaagatcccagctagccacatgaaaacactgctctctgggcagcccaaaactcacctgtggcactgaagaggcagccctgataggcaaggatgggaaaggaaggatgatggaagagggccgactccaggcagagatttttaagcactctatgaaaatagacacacatcttttaatacatctaggtgatcacaaataggcccactagagactgtctaccccgacacacacacacacacacacacacacacacacaccccaaaaacaaaaaacagacgaaacagacattttgatcagcaaaaattaatgcaatagacaaatgatcaaaatacagtctatccttttagtgtactccttgttttctgtgtattatctctgctagtgctcagattggcatgagttgtcctttcaaatacatgaccaatggtttaaaggggaagtgttctgagcccccagtaatgagataaactagaataagaaaacaatgctcatcaggcaaggctacagttgtaccactgtgccccatcctctttactttatgctgattattattaatactgagaaaagtaggttgaatttttctttcacacagcaaacctaattgtcaaattaaggcaagatatttgacaaccttatctgccaaattttgaaggtgcaacagcagaattgggttaccatggtagtgaccacactggtttggagatttgtatagacacaatggaattccctgggaaaatggtgtttggtcaattgacatttcaccacattgaaattatcttctgaatgttaaattcctgtggttgtagcaaaaacaggataggtttttaattctttaattgaattacatacaacttgacacaagctagagtcatcagagaggaaagagcctcaattgagagaatgcctccataagatccagctgcaaggcgttttaaaatttaacgatcaaatggggcagggcccaaccctttgtggttggtgctgtccatgggctggttgtctggggctttatgagagagcaggctgagcaagccatggaaaggaagctgcaccccttcataacctctgcgtcagctcctgtctccacgctccttccttgcttgagttcctgtcctatctttggtgataaacagcaatgtggaagtgtgaactgaaaaaaaatccttttactccccagcttgctttttggtaattgaatttcactagatcaatagaaactaaccaaacacaaactgttgtattatttaatcaatttccttccttccttccttccttccttccttccttccttacttccttccttccttccttccttccttnnnnnnnnnnnnnnnnnnnnnnnnnnnnnnnnnnnnnnnnnnnnnnnnnnnnnaatcccctatcctatccctcctccccctgcttctatgagggtgttccccattcacccatttactcccatctctccaccctggcattcccctacactggggcatcgagccttcacaggaccaaggacctcacctctcactgatgcccgacaagactatcctctgctatatatgcagctggagccatgagtccctccatgtgtattcttttgtaggtggtttagtccctaggagttctgtgtgtatgtgtgtgtgtgtgtgtgtgtctgtctatctgtctgggtggttcatattgttcttcctcctatggggctgcaaacccctttatctccttcagtcctttctctagctcctttattgttgagataaaatttgatgccatctatttgtgtacaagaaacgattggctgtgtaattaaaattaatcacctgctagtgatgctgaaaacaataaataacagcaataaatgttccccagaggttggaggttgtactaaacgtgtcatggtttgtcacacataaccttcaaggtttgataagatgacccctctattatagatgagggatatgaagactagatgctagaaacatgctcaaacgcatgctgtaaggagagctcaggcttcagaagcccccaccagaaccatgtgtgctgacttgatgctacctgctaaggttgttccaatagacagctgaaatcacacatgttataatggaatttttggcatacttgcaccaactgcctatataactctgcttgccaaacctgcatcttgaaatgatcgtataaaacagttatcataaaagaacatgaaatggaaacaatccagactccccaaccacattttctattatgtagttatgctgcagtccccaggacgaattttatatgtatatatctcaaaattttatcatgcttctttaagaaaatcatttcatttgcgtattatacttaaaaatgtcacttacaagttgatttttatctgcaccaatctacttacatatgttaatgactatatttagaaagaaacaatatgaattactgtataaatctgtgtcctttttttcctcaccagactgatagaagctgtatctcagataagcatctgtttgcacttgtttaatctgtgtagtgcttagaggcagaaatgagagaaactaaagcaataggccaaagtgttagacagtcgggcatattttcatagcatacagtgaactgatatgacagtgatctattttattgtcacagttttgacagctcagctggatagcaggactgtgaaagcagagagctttggctttagttgtgtaggttgatattcacaactacagcagtgttagttactgtaaggaggaatagccttaagtaggcctgctctattgttaataattattaataatcttcattgttaataatcaaaaccatgttacttctatgccatttttttgaaaataggtctgtttctcagtgttgaattgctataaattacaagaatcatgctactcttcaaaattatctaaaattcccattttctgtgaaatatcatcaatactctgtaggtcagactttgcccgagacgtcctctcattccttccatgctctgtgaaatcaagttcgctgactgtagtatgaaaccaggagttgtaattctttctattttgatggattacagatggttgcaaaagcctgctattaaatgactgtctcaactacatccatgttgagaactatcacatccattacatttttctaagtcttcactaatagcactgagcacacagtggcaacctgtaatcattagtttgggttacattgacttcctcattctttataaaagtggagctacatatagaatcacagagctatatacatttcagaaggaaaatagtctgaactgtgtttttaaacatggaaaacattgttttccccattctaattctaaatttcaacacactctgttttttttaaggtaaagggaagtgaaaatttgtactttaaattttctttttaacatttatttatttccaactccagattttattcctggttaaccctctgactgtttcacatcccatannnnnnnnnnnnnnnnnnnntcccacccccaaccctgtacctccaccctactgccctttaaactccttggggcctccagtctcttgagggttaggtgtatcatctttgactaaacccagaccctgcagtcctctgctgtatatgtgttgggggcctcatatcagttggtatatgctgcctggttggtggtccagtgtctgagagatcttgggggtacagattgagactgctggtccttctacagggatgcccttctcctcaacttcttccagctttcccctaattctaccatagaggtcagcagcttctgtccattggttgggtgcaaatatctgtatctgactctttcatctgcttgttgggtctttcgaagggcagtcatgataggttcctttttgtgagtgctccatagcctctataatagtgtcaggtcttggagtctctccttgagctggatcctactttgggcctgtcactggactttcttttcctcaagttcctctccatttctatctctgcagttctttcagacaggaacaattttgagtcacagttttgactatgggatggcaacctcatccctcacttgatgtcatgtctttctgttggaggtgggctctacaagttccctcttggtaggatggtttctctagaaagactatctgagttagttttactagaatgcacatgaggttttattttctgcaatgcagtgatgtatcatgcatttctacccatgtgtttaacattgccattcagcagttggcctcaagtaggtttcattttatcatttttctctggaatcccaaataaaactatgttcaattgcttcatgaacaaaaacgtgctggaatgttcacttgaatgtgggtaaggaaatcatgtactaaaaaaaaaaaaagaatctaagagtgcctgaggagtaaatctgaaaagctgattcatttaatgacaatgacaccctcctgaaatctatgtgtgaactccatggaccagttctttcttgttttatataaatggtaaatggtcagcttctttttatatctagaggacatctggaccaatcagaaaaagtctacaaaaccaaatcaatactcctcagtgatttctaattttcatctatgtagctagtgtaaatgcaattgtatatttcctatgactgttcgctacaagtatagtcattatcagctcaacaaaatagtctggactgtttaaacaaagcagactgtgtagtttagttaggggcattttatctgtgtgagagtctcgggtaaattgaagtatccaagtttgttggcatgtttttgattatgtaacttcactgaatctcaactgtcttttgcagaatagattaaatattaattgtgttcagaattaaagagaaattaatgcagagtttgctgaggcaggtcccccccatctctataaaagcaactcatttccatctgggcttttccccaattaaaattttatcaagtgaaaattgggataaacaaaataatttttccaaagttaaagcaacctttatgaattgaaagtgtactttatttgaatttatgtttaattaaaatgtagaaccgcttttgtaatttcagcacattgtctttcttttccttgtaggagcctaagttgccaacggatcacattgcataaaaacctgttcttttcatttatttgtaattcgattgtaacaatcatccacctcacggcagtggccaataaccaggccttagtggccacaaatcctgtaagtaaaacatggttgtacctttgagggttagtaggaagagacatgggctgggaggcggtttctgatatggaatatgtgaatcattagataagtgtatatgtaaatttggggggtttacatacaggaaacatagctgtattgcagcctaggaaggtaaatttccttcaatactttcaaagcttcagttcttgtcattggctatggactcctgatgctggtggcccataagactgtgactacacaatgttcaacccaaaccaatctgtacatctgagtacttaaatgaaaaaaaaaaatcccaatatacataatgggaaattaaggtaatgtttgctatcaagtttccattaaaaattaataaaatcaggaagacaaggatgctttgtattacatgctttgtattacagtcatgttaaacgccattaacatacaatgttagcgtgttctaccaatcattgtttcaataagcgctgatacattcttcttcctacaagtcacagttaaaaaatatatgctaaaatttatgatataaattgtccatgatataaacatgtatgtaaactatacttggattcaaatatatatatatatatatatatatatatatatatatatatattacatataatatatttgaatatatatattagaattctctagttatatatatatatatatatatatatatatatatatacattagaatactcacacttttagaatcacctactttgatgttgtggcaaaacctccagttttggatatggatatgtgtgtggtgtttgtgtgtgtggtatgtgtgtggtatatgtgtggtatggtgtgttgtgtgtgtgttgtgtgtgtgatatgttgtggtgtggtgtgtgttgtattgtgttgtgttgtgtgtgtgttgtggtgtgtgtatgtgttgtggtgttgtgtggtgtgtatttgtgtgtatgaaaatgtgtgtggtatctgtgtgtgctcttgagcacatcaagttgtgttttctggattacgttatctaattactgaaatcagagaaggaaagggatttccaccaaatggctcaatgaatagcaggcttgcgtgtgctttatgcgtattttcagggtaattcacaaagttctaaagtttttccctttgttgacacatgtgctttctggtggtttgatcttgctcgtgttcctctctaaagtcattgggggaggaaacagaccagaacataattagcagtataaaacactggttgacattctgtcatttaagaatgagtttttctaggagaatctgttttgtaacacagcaagagtttctaactcttatgtaagagaagcagaaggatatgtatctaatagacaaagtatacaatgaaaataaagtgaatttattatttggaaaagagtattttccaattacattaagagtgccctccacagaaatatttttctgaagtatgtactaaacgcttttccttataatagtttatattaattttaaaataacatcagaatcaagttgagttagataagaatgtaatacctacataaatattgagggttaaattcatcataaatatacgcaaatatatgtagttaaaactattttatttttaagatacttgagtttcttgtaaaacacatgttcctgaattatttaaattttaattaattaaaatttagcaaatgcattcttcacacatattaaatgaagaaataatgttacaaatatccttaaggaaggtgctattacatatataggttttttttgttttttgtttttgtgaggcagagtttctttgtgtagccttgactcatatgactcatatggaactcatatggaannnnnnnnnnnnnnnnnnnngtgaggcagagtttctttgtgtagccttgactgtcttggaactcatagagatcctcctgcctttgcctcctgagtgctggaattaaaggcgtgagacaccactttccagcttctactactagttttttttttttaatctatacaatgtgtggccatttacaatgcatgcctcaagaaatatttaagaatttgataaaatatgtataaatgataatagttcaagttcaagtcctatctataactctaaacttattttcaagtggtcttggtttctaacataacactaattaaaaaattatagtaaccactaaatatgtattgaatttcagattggaaattaaagattgtaacattctgttacagcctattaacttcgataaggcaagaatcaatatttcccagattctctgtattttctttatttctttatctgatatttggatgtctttctttttctacatataaaagaggagaaagtaggaatccaagaaaaagaggaggcgaaaccaccattctttattcttatatgaaaatttcatacatttaggcaatatgtagttacttagagattacttagtaagttttttttttgtggggtgaaggatacaaaacttactaaggattgatacatgtttaattaagtgctgataagactatcaaagttattctgacagaaaacaaccaaaatcaaaacagatgtaccatggtgtatgtgtctactgtttatatttaatgtaaataaatataaataataacttgaactcattagaaacgcagatacccagtaagctgagggagatatttttttggtttggaattgtttggaatatcacatgattcttatgaactgagagagtacatcgttgataacttgagaaccaccatggatgagtatgcagaagagcactgcataactcagattccctggtgtgcacatttttgtgtgggggacagaaaaatcccatggtttctgaaataaactggacgacttgcttcacatgtagatttcgtaaacaaaggaaccactgtttcgtcctcacaggtgagctgcaaagtgtctcagtttatccatctctacctgatgggctgtaactacttctggatgctctgtgaaggcgtttacctgcacacactcatcgtggtggctgtgtttgcggagaagcagcacttgatgtggtattattttctcggctggggtaggtgccactgtcattacctgcttatttatctgattaagacggctttttagcttttaggccacgtgacttattactaatcattctttcctagttgctataaattgaaatatgccaagtgtcacaagctcatggtttctctagtctctttttgattaatgatatgatagcttttttttattagatattttctttatttacatttcatattataccctttcctggtttcccctctgaaaaccctccattccatcccccttccccctgctcaccaacccacccgctccagcttccctgtcctggcattcccctacactggggcattgagccttctcaggaccaagggcctctcctcccattgatgtccaagaaggccaatgtgatagcttttttatattttgctatttcaatgacaagctcattctagctgaattcatagtgactagaagaagagaattaaaattacaaattaaagatctggtttctacactcttctgaaggtcctctcttttcacttgtaaaatggagacaaggtgctaaatagctttgaagttccaccaagaaaacctttgtgatccccctccctctctcccccccctcactctttctctcttgctctctttttcatctttgttttcgagacaggatcttttggcttagaacttgctatgtaggtagatcagaaagctttgaaaccacagagattcttctatgtcttcttcccgagcactagaattggagatgtgtgttgtcatatccagccctgttgagatcttcttaaactgtcatcttatggtcaaattttggggtatcaataattgaataaatgtatgcaaaagatccatttctttcacatactctcttggcattgtgtaactcacaaaacaagctacaaaacacactctgtgtttcttaaggtcattggaatggtgtctgtgaatttgacacatggtaaatgaatttaatagaactaacttccagagataaaacagaaattttagttctttattatttatcaaatgaagctgtagatattgtgatagattaaagacctatgcatatatgtgtaccaaattgtcagtgcattctgattgtctctagaaaatatttcttcacttcagttttctttagaagttcagatcctcctacaagttgtttttattgtttttaatatatacatacattaatatgtattcttagatttttattctatttttgtgtatgtgcacgtgcacatgaatgcagtgcttgtagaggccagaagatggtgttggattgcctggagcagaagctctgaggaactgtgggtgctcagagccaaactcatgtctgttataaaaacagcaagtgctcttaatccgtgagccccaaaattgtttagaacattaaaaaatatatatcatttcatctgaataaaattttcaaaaacttctaactcaatttattatatattttccaaaaatgtctttttatattgcctggctttctttcaaataaataagtatttatgttggatgaactgtggaatttgaaaggtacctccttcctgtctgtggcaccagattctgtatctccacttggacttgtgaccatggaattcccttgttactgtttttttgtttgcttgtttgtttaatgtatataggcatactgtatacatatgtgtataaatatttctatttatgtatacagtgtactacatgcatacagtgtcctcacaggccagacgagggcaccagatcccctctaactacagttacagaggatttgcactgccatgctggtgctggcaattgaacctgggtcctccagaaaaggagccagtgctcttaactgctgaaccatctttccaagaattctcttgttcaaaatttcaaaatctgggatagtgatctagctctgttggtagagtgcttacttagatgcatatagtcctggcttctatccccagcacctcataaaccaggcatggtgcatacctgctgtcccaacacttaggagatggaggcaggagaatcagaagttcaaggccatcctcagctacatagtgagggtgacgacagtctcctacagaggacctcttctcgaaataaagaaggaatatggtcctagaggagatggctcagaggctaagagctagttactcctccagaggacccgggggcaattcccagtggccaactcacaatggcagctcccaaatgtctgtaattccagttccaagggatccaacaccttcacacagacatgaatgccagcaaaacatcagctgcacataaaattaaataaactatctttaaaaaaagccaggcagtggtggtacacatctttaatcccagcacttgggaggcagagatggggatctgagtctatagaatgtgttccaggacagctagggccatacagagaaaccctgtcttgtaaaccaaaaggaaagaaagaaagaacaatcaaacccatgttctgtggctgtggctgtgtttgattgactattcatggtggtgttgagtgtttttttttttttttttaaagatctgatttagaagcctcaacacatgcagaaatcttggtatagcaagcactttttttcttcagaaaatggtttaccatgaatctgtcttttaccatagaaataattataagtctcaatatttcccaacatttgacattaaatattaaccaatttcatcccatggaaattatatgaatacaaaaattctgctaaggattgtgacttaagcagcatagaatgtgttaatctctggaatcttgctgatttaaaatgatatgtgatattcaaacttggtagtttgtcacactttcctcttgactatacatatgcaattacacagtaagcgtaggcatagttagtttttgctactcaggtgtctctgaagttcatgttcatgacttctttgaaaatcctcatcaataaggaaaattacccattcatttggttttgctttatttgtagggtttcctctgcttcctgcctgcatccacgccattgccagaagcttgtattacaacgacaagtaagaccctttccatttgtgactaatcttagaactaagagaaatgaaagtctttcaaatatctttactttatcccccagttgctggatcagctcagacactcatctcctctacattatccatggtccgatttgtgctgctttgttggtatgtaactaaaattctcagtttctcatcgttgctcctatttcctgaatctcctctccaactttcttattcagagttggtgcactgcttaattgaataaagttcagcgaaggtgttatatttgcacagaaaaggagaattgccaatttgtaaagcatcagggaccatgggtgggaagctgcttttgcagctgaacatgaagtgaggtcaaagtggttctaacagaattagacaaatgctaagactaatgcagcaagtcctctggctttggcaaatggaaaacagttggtgctcaaaccacagccaggcagggaagaagaagaagcataaacgaatactcagacttttctctcttcctgtctctgatttcttagttctgcttgctagccaaatacagtaaatgtcagagtgtcagagtctgagtcgtgacaccatgggtgctcccttctccaggaggagcagaacacaggattgttctattaagaaactacaacacacctatgcaagagtaacaggccaatgaagagacaactttgctttgaaaaagtaacgctcatgtattatgtaattacaacaggccatttaatatgagtatattcaactgtctttgaatgtggttgtgttatcagaaaatctgtaattcctctttgggttcttagtctcctaactcaaaattaggagaagacactaaaacaaaaaaccaaaaacaaaatcaaggacaatgttattacagtgtaagagaaaaacagtagggcagacaagctgtaaatcttcccagctggaggacagagaggaggctgaaggaaggaccggccatgacattggtaagcagccacagagcagaagaagggtgggagcttcagaggaatcaggagaaaacctagggcatcacgaaaagcatgctgttttgggaaaagaaatagaaagcacaaataggaaaatgtacactcctctgagtaactcagaaaagcaggcattctcttcatcttacacatgcaagctctgcaagcatctacacgaggggaggggtctggaaagagtaagtagattatcttattcacaggataattattccttccacttccttagtgtgggttaagatgaattagttttctcaaggggtggtgtgtgcccaggtgactgacagattcagatagactagctcttatgtcatgtctctatgcagagagagggtgacagagagagacaaagagagagagacaggcagagacacacacagagacagagagattgagagagacagagagacaaagagatagacacagagagggagacagagagagagacagagacagagagacatgcagagagacagagagagacagagagatagatgcagagagggagacagagagacagagacagagatacagatagagacagagagacacagagagacagagagacacagagagagacagagagacaaagagatagacacagagagggatacagagagagacagagacagagagaaacagagagacagagacagaaagggatagagagatagagacagagagagacacacacatagagagagagatctcctgtcttggaggaaatagctctccttaataagtcttgagagagccctagtccccagcctcagtggcctccaaaactacaatattcctaaactaagagtccctaaaagcatttacgaaataggctgaaattgaggagtaaatacaacccattttcacaatgaaaatctagacatgcagttctgttcatcagaagtaattagtgtctggactggacttagggtcacaggatgatgtatagtctggagtcagggatggtcttttaggaagaattcagtaactagagctccttcctggattcctaaccaggaatctaagaacgctccctgattctggccaaggataagtctggaattgtgcgtattgagggtccttgcccttggcgacaaaagtcatatttagtgctttcattatgttatttcaatgaacaataaattaatacaaattagcatgttttccatagagcatgagagattctaaggcaattacactttctaagagtggtattttgcagctggcaaaatccattctttcccacttcctccttcacatcccaccctcctagtaggcactggtgcaaatacagcacatttagatgctgctgagagaagatgcctttaatttgagagctaggagagtttaggtcacttgagggcttaggtaaggaattactggccattcttgtgtgaaagtcttccaatagtgttcctgtagcatttgtactggctcgttctgcttccttctatctatgaccctgggcactatggtgatatgaatatatcttgtgatatctaccagctattgaacatcatggctatcatagtaaaaagatgtttctcagcaggcattaattatatgtaactcttcatctttcccaggcatgaacatcaaccattattggctaaccaagtactcagccccatacacagacacacacacacacagacacacacacacagacacacacacacacacacacagacacacacacacacacacagacatacacacacacacacacagacacacacacacacacagacacacacacacacacacacacacacacacacacacacacacacacacacacacaggcaacactaaacggactaagctggcacatttagatatttatatgtgtgcctaaatatatgcatacatataacagcaataattaaataaaaataggccatgaatttgggggggtgtggggatgggtgtttacctgagagaagttacagtggggaaggggagagtcagggaatgatgtgaatgagtagtcatgtcacaaaattgccaaacacataagttaaaaaaaaacaatcaggaatctgttaatcaggtctgttttaagtcagaggaaattcaaatgggattcatctgaaatgtaaagttcttctacttattgcttaaaataatattgatgtgggaaattgcatagagcatggattccagttcaccctgccccagctatatatagagagaagcttacataaacattagcttcctcttcagttatagcttcacgttttaagccacaatgacagctttaatgacaggctttgtatttaactgttcttccatggaagatagatctaaactgccacatttctaccatttattaattagtgatattttgtatatttggatgtttaaatactttgtaatacaatttatatctataacttataaatggataaaagatcattcataagtggacaataagttatcatccaacttgcccaggaagtggtagtaatttttatttttttaaaaaagctccttctatatgttagagggaactctctttagagggtcagaaatagaactggcatgctgacttgtgtcactgttcatgtcccacctgtcaaatggctttctctatgtctgtctgcatggcattccaatgtctgtcaatgtgttcttctcacgaatgtgttctcatcaggagtctggttagctatatgagtttaaagcttgtgttacattgaattctcttagcagtggaataattttatgcttacttgttttcataacacatgttaagaaaaaaatatatgtgatttattcattttttgccttgatgagagatgaactttcattatttgagtttattaaagtatatagagttttgttgtatgaaatttcatgattaggttattcaacaaagaacagatattacagaagtcaaaggtcacagaaaaaggaaagaaatcaacagttagcccaatatgacatttctggacgaaatgaagaattatccataggaaatgggcaaaatttagtttgcctttaggtcaagatagtggtcagtgttaggtgtcatcttgccaggatctagaatcatctaaaaggtatgctggtaggtgatttttcttaattaccttaatcaatgtgggaagacacactttcatcacagacaagaccatttcatagccaggttgtcctggacagtctaaaatggagcgagtaagctgagcactagcatacattccatgctgttgagtcccgactgaatatagaatgaggccaactgctttagattcctgctaccttgatgccttctttgtacagactatcccttgagctatgtgctaaaataaactcttacattactttgtcagagtatattatcacaggaacagggaaaaaaatcttaaagtagtcaatataaaaggagaggaaatagagtttgaagaaagagaaagtggatgaaagggacggtagggtgtagacgaattgaaattaatgcattcataaggcacattcttaattgctgagtcaaattccattttcagagttctgtgaatcccttcaaagacaatgttatctcttggggaaagttgctatgacacaacaaataaatagtaaattgtaattacagagagttatttatagaagttgttgtgggaagctaaagactatttctctagtatagtttagtttgagtatcagctggctcagttgcatttgctttatccaaaagcataaagagaaattacagtagtatttcaggtacctgctatgagaaatggtcatatagaaaaattttactaagattattacaaaaaggaagacaaaacaaatatgtaaaaatagttattttggcaaaatacactcttggagagcacattctatagacactgatggaaagctgattctttaaaaattaacatttttttgaggctgaagaaacagcttagtagttaagaacacttgctactcttccagaggaccagagttcagtttccagcctgcatgttaggcagctcatgactgcctataattccagctccatgtatccatgtatctgacaacttcctctaactttcatccgtaaacacacacacacacacacacacacacacacacacacacagtcataaaattaataattaaaaaataacacttcttaagaataattcctttttgctaaaagtgtttatgaccatgaaatggaataatagacaaatcttaaatattacatagaaaatgagcttaaaatgactaaaatatttcctgactatgctctacaataattttagcataattttattttcctaaaagttaatttcactaaactttatgtacctataaatggaacagcattactttatactcactaattaatgtcttacaaaaatgtacctttagttcttggatatgaaatagtctaagtttataaaactggagttcccatataagcttctttctttttaaatccatccatgcatccatctatctatctatctatctatctatctatctatctatctatctatctatctatctatctatctatctatctatctatctatctatgcttttgattcagggtttctctgtgacgccttgactgtcttggaactcactcaatagatcagactggcctcaacctcatagagatccacctgcctctgcctcctgagtgctgggcttaaaggcttgttctaccactgcctggctctcatagtaaacacaaatggacttttagatggtattttattttctttttaggtaaatctctttttcctattaaatattgtacgtgttctcatcaccaagttgaaagttacacaccaagtggaatccaatctctacatgaaagccgtaagagctactctcatcttggtaccactacttggcattgaatttgtgctttttccgtggcggcctgaaggaaaggttgcagaggaggtgtatgactatgtcatgcacattttgatgcactttcaggtaaggcatgcctgccttcaagagggcagcttgacaagttttatattgaatttacatataggtttggcttcactcttgactacttgaaaagtgtcaaaacatgaagcctttttgattcatgtgccttgtcttgggctcttctctttctgttggtttgtcttgtccaactttgatgtgatcatttttatttcattttattatattttaaatgaatgaatgaaaatctagccactagggtaaaggttaacaactgaactgttaactgatccttgctgggaggaagaaaatgagtttttgccagtgccgtgacagtataccaaccactccacgacaggcatcatgttcagaagtagtagaccaatatataatggactctacagtgtgtgtgcccatgtgtatgtgtggttttgtttggttacagtttggtggtttttgtttttctttttgggcatgggtttattgtgttttcttgttttggggggttgttgttgtgttgggtttttgtttgtttcttttgagaaaggacttaaagttgaatgggtaaggagggagagttgattcggaaggacttggaagaggggaagaatatgatcaaaatattctaaattaaggaatcatttttaaataataaggaatattgttgctcatataatttattttttacagggtcttttggtggctactattttctgcttctttaatggagaggtatgtttaatgattttacaactttttttaaaaaatagaatttccttttaaaatgagatgaagttatacactttcccccaaacaaccaattttatcacagaaaaaaattacataaaattattttaggcacaaatatcttaaaaatgtgggtaatattagagttgagtggtagggaaaagttagtcttacttcaatgtattccaatgagtggcttccattcagctagccctttgacctactattagaaggtacaaagtctggatgttgcttgggaacattgctgggcaaacttaacttcatagaacttgtactttcataagaaacagaatctgttcgtttcctctgttctctttttcaataagctcaactatatatgcctttgaaaggttttatgatagatacaaaagaatgctgtaacaagcagcatggaaatgtgttattggagatttctaggtttctgtctgaggactttctatttgagaggcttcagtaatctaactgggtggatctgtctagtcatatggctattgctactgcccagttgtttgagtatcattgactttgcattttatttgttcctgatctacttggccagttttcatctagagggtgctagcacaattgagcacagcatagacatctagacagtaactcagtgagaaatggaccctgtgtaactgagaaactcatcaggaaacctcagatagagaacacatgggccagtaatttatcttataacttatgtggatatttcctataagataaattactggaaattacataggtctcataagaaactacaaattacttttacttggtctaagtaaattctacttttttttctctttggaaataagcaaacaaactgtttagcataaaaatgaaagtatatgtaattgaagctatagctactacattacatttatctataacactgtgtaacagtgttatagaagagtgtactgtcaaatgaaactattgagttgtaacttaattggtatctctgtgattctacattatacacgagagtgactattttcctcaagttgatggcacttgtagacagagaatgaaatgagagggtacagataaatcatttgtcttgacaggcaaacgcatacaacctttattacatatgcatacagatgcactgacttaggcaatcctatatgttgctaatgttggctatagtaaatattgatgagtgacatgaaaacatgtcaaagagcatgcatggaatatggaagacgtctccttatctatagaaacataacatcagtgtggtttttaaaaaaaatatttaagttatagtcactagtaaagcaggtgttgcagtaggtgaattaggataggagggggtggggaacgaacatggtaggaccttcaaaactctgaggatgcttctttcttcctagcatttatattttaggaaagacttggagccaaagaaagtgtatttgccttataaaagggaaataaaagcaagtgatttgtacttttgttaaaaaggtgaatgcgaagttttcataccatgccccaacttcaccacatcctcactataacagattcatttctgtgttgatcaaagagctcattgttttaatgaaaaagccatgtagaaatgggaacactaatcacactgcaagctaaattttaaattggcactttccatcagaaacagtatccagggagtactgacgtccatgctgtccacttctgttgtcctttatctgaataagcagaagaggcaaagtaccttgttcttctgccatgccttaaattgagaacatttttggcattggaaattttaataacaagaaaacctttgaactcagttgttgccaaatcctcagttcatcacatctttaatacgtctccgttttccttctgcttgggagactgtccgtttgagtatgactcagcccaaatcttaagaaatgctgtaatccctccttttctgtctctttgcctcttggtttttcccactgttgtaacacaaagaaatagctgccagattcaatttgtgtggttccaactatgtcatgtttttgttaaagtcatttgcttggttttagtttccttcttgcccttcatgttaggtcaagtggcttgctttttcctgatatctgtgctcacgtttgaccctctgctgaattttaccaaatgtctatctttctcttagcatttcttgctagttaactataggttcacaagtggtcagaccacgttcctctcagccccattccactcaaataaaaatatgcaatggtaacctaaagaaggggctatggttatcagaaggacatatgtatcaacaaagcattgtaagtattttttatcaactaaacagttaatgctgagaagccttaactcatattctgtaaagaaaactattttccttatatttatagttatactcttaaaaattgatttagattaaggagtattattattgaccctatcatgtgctaatgagcatatacattggatttagctgcctgcataaaacttacataaaccaatgagaacatattcatacctttaataattcctatatttttcattttccccattgaaatgttttgaatgtctaacttaacactctgttaaataagcatgatcttgtattagagaaagaagttaaaaatgaagtattcttatcacacaagtttgcaaagactgtgggtctttaattgggttcattttttaaaaaattggtaaataatagcccatactacaggacattgccttttcatcatttttctgatgatttattcactaagaagaaataagctggtgatcatagttgtagattcttcaaggacaaacatctaacagttcatgcttattttgatttctgggatttggttagtttttcttttagaactatctatcagtccaagggcctcaagatggatatctttcaacatgagtctggaatattttatgggaagatacaatccactcccattcaacttgaagcaatatagctccagcttataactagtctagcatttataataaatgagaacaatatgtatgaacatcagaataaaatacttcccaccaaaaagagttacataattgttcaaaagtatttcttgttaagatctctgaatatttacttaaacataacatgtaaacccattggcctgctgggaacccacagagctgatgcagttatcatttgcttacatgtatggagatattatatacataagtattagtatattactttaatttaaataccttattttttggtttagaattgatcagaccataagagaatcaaatagtaattttgtgcaaaataaatacatatattatactaaaaatcttttatttccctagtacttttatgaatatacattagttcttattaccaaatacaaagagatggtccaaaagttgctgaacttcttaataacatattatataactgagtttctagcatttcacttatatagtgtttgaattattgaataattaaatagacattttattaattaattttgaattatatttaagaaatgggaaactccattttgaccatgctttttccattaatactaaaacattaaataagacaggaaaactgtttttatcttaagtggtagcatgtaagagacttaaaagtaaccctaaaactgtagtctcctataaatcattattggttgcagaatgtttggagaaggcacaagaaaagaaacaagacagattttataaaatatttaatatggactttacacaaatattttgaacagaaagttaattatatactcttaatatctgaggatgttaagagtatatgaattactagatttctttttattcttagattcctttgggtgcaggcacaaaatattagatggcagattgggaaaatctattcaaacaacaaacatctaggcaaacatatattacaccacagggatggggcaaatatattatgacctaaaactggccagcctctactcaggctgtacacagttatcagatctgttagtataaagatgatggcatctaagactcagctgactattttcatttgtgtttaaggactcagcatgaaggaagtctttctagagtcctaattcaatcaaaatagaagtcagtgtatctgacacaattattcataatctttaatttcagtcaggaaaaaaggcattaaacttcacatttgttttaagaaagaaagctatgggctagaggaattttaatccagcaaaatgactgctctggcaagaaaccacatatccaaagaccttctgggtctctgtgatctggctggaatgcaaacaagcctttagtaaatgcctttaatcccaaacaatacaggtaagattagtttacagaaggaagcagtcatgtttgaaagaaacatctaattgagggatagacaaagtgatgaaccagagaaagatttaaaagactgattcaaagataggacatgcccaactctcatgagaacaacatagggaagagaatttagggcatcataaatacgaagtgaacaacctactaaggagctaattctcattctctctctttctctcctttaccttttatttttatacaagatataagtaagatacttaggtaggtctgagcttacttaatactagcatgcaggcaggtgttgatcttgcagtattcctccttcagtttcatgtgtaactaaaattatagaccaggaccagtttggtcttcttcctttaaagagcaaaagcttttctgccaaacattttgttatgcatcaaatagagtattttcagctcaactaatgggttgtttttgctgtttctgtttattgttgatcaataggttcaagcaattctgagaagaaattggaaccagtataaaatccaatttggaaatggcttttcccactctgatgctctccgcagtgcatcctacacagtgtcaacaatcagtgacatgcaagggtacagccatgactgccccactgaacacttaaatggaaaaagcatccaggatattgaaaatgttgccttaaaatcagaaaatatgtatgatctagtgatgtgaaaatatataaaatcacacacttgaacctatgattttatagccaaaagattggatagccagcaaatggatttctggaataccatgaagaaagccctcaaatgaaatgggaattgtatggataaatgtttaacaaccctctctctatgggggagaaaagcctcaatttatattgttggccagtaactactcctaccataactgatttcaagttaccaacctgacatcactgaatgtgtaattggaaagaaaataagcacaaacaactcccaggagctgacatgttctggaacctgcacagcactgcatgccctcagagatggaagtctgtgcacactctcacccacactgaccagaactctgctcttctcatctgaggagacctcactcggacttacagacatgaaaggaaagtttggtttttgttataaaactcctcatccttttgtcatttggtgatagtgaatggtttgtccagaaacactttaaccctctttataacttctcttgtagactagacaaagagttcattatctctgtggtctcatgttactttctttaagaaaagcaactgagcagaattcccatgggcttcttagttgctgctacatattgttgtatcctgtggtatatgcactctgaatcactagggagacatattggtagaagctacaccttgtcagctctctctctctctctctctctctctctctctctctctctctctctctctcggcaagaataggaggaaatcagttttctggaatctgtaaatagaaactttggcctttccatttctactgtgtagataagtaagtgatcaaccattttacatgaagggaatcaatgaaggatttctttttatcttgggaatctgagagagagagagagagagagagagagagagaaagagagagagagagagagagagagagagagaggttgtacaaatgaaactgtaagtactctgtaattttattttattgtttcaattcaaaacacaacctaggtaacttttaaagcagatagatgatgcaacattatatgcaacttagtatctgatactgtgtctgggctgatttattttatagtaaaatagaatcatgaattctatacttggtaaatattttaaggacaaacagataccagcatcagaagtttgagaactaaaaacaaaccccagaaatatcaatgataagatatgaaatatttatttaaaaatgtaaagccataattttacaagcatgatatatttggtgtgctgacatactgcttccaatatgacatattccaatttgatgacaactcattcaaattcagaaattatgaacaactactgtaagaagtgctagtctgctacatttgtgggctttaattcactaaattatagctttactgatttttactaaatgaagatacatgcttttgaaaaagacccaggttattatttttttatgaaccacagaggaattttctctatgtaataacactgtttcagtatttcagtagactactgtggatgataatacaagccacgggaagacttgaacttaccactcattgaggatgaagtgtcagatatttaagtaataattaaattaagacagaagaagattttgcttgtgagtttaagtgacattttaaatggatttagtttttccaatattgcttggtttggagtttctgaagaacaagattgacttcagttagtaaaagtcactctggggacagttacatgagtccatgttttttaaagtgtgtctgtcagtttacagtggatgagaggagtgactcagccctcactcattgtcttaagctatagaagagaataaattaaaaagttgtttgaaactgtcaaggaaaagaattcaaattatcaagcactgatgtattacatgatctgacagacatatttgtaattttctttttttttttttctttcttttttttttatatttgtaattttctgaactttcagctgcttaaaccgtacaaaccttccttttaataccttcagactttaggtattgattattcatatcttcgctgacagtgttcgtgtaattctgcattcttctaaacaaactgtcaagtattaacaataaatggtagtacagaatgccgaattaccagagaacatacttaaaaggtattgtaattttaagttttattatttttttactataccgagtgtagctgagatttttttactgccaatatctactgtggtgtcattctcagccatagcagtctaagattagtcagtattagttttgtaatagtatttttgaagctggatttctctaaagctgaagtgccaattaaaatatttctataatgcttgtagaaaaaaaatccaaaaattttgaaagaaaacttctctggtgcctaaaaattaacttggggagtttttagcttttaaaagttgcatctattatttttctctaatactttgttagagtcatggctgacacttttagaagcgactttgtatttttttgttgataaaccagccttcctggaggttagtgttttttcaaatataacaaactgtgtagggtttaggagtagtcagtgttatacttactgtttagatattttaatgtgaatctattttaatttcctttgtgttttaatttgctcatagaaacattatatgtaaaacatactcaagttcacttaaaagaactcatattttatcgacataaaatctctacttaggttttatgagaatattaaagttgtaagttatcactcactttcacgcatcctccctggactatagagcaattgaattcctcacaaaattcttgcagcaaataaagaaatactttgcaaaat

SEQ ID NO: 419 - DNA, 4748 bp, Mus Musculus
cagaacaagccctctcttcgcagcgtgcacttctgccttaggaccggcgggctctgttgcctggacctcacgctgcctgcaggaccacattgcaaagctttccacacctcgcctccgggaaactcttgtgcagtatctcagaaaatcaaactccctcctgagactattcccacagaatttccttaggagctgtgccagggccctatgatgatacagcaacatcttgtgctaccaactgtcgaaactttggatggtctaacactcaggtcatgacccttgtaattaagaaattcttgaagacaatattcaggagaaaatgtgatttgagtctggagacaattgtgtatgtatacttttcttaagatattaaaaaacaaatccaaggtcacaggttgcttattgatagaagagaaacaatacggatagaagagaaatcagaaaattgcttatgattgacaagaacagctgcagcagctacctagcttgaacatacagcacatttcatttggactctaataatggataaaaagcatatactatgttttctggttctcttgcctcttaatatggctctcatctcagcagagtcggaagaaggcgtgaaccaaacagacttgggagtcactagaaacaagatcatgacggctcaatatgaatgttaccagaagatcatgcaggaccccattcaacaagcagaaggcctttactgcaataggacctgggacggatggctatgctggaatgacgttgcagcagggacggaatcaatgcagtactgccctgactattttcaggattttgatccttcagagaaggttacaaagatctgtgaccaagatggacactggtttcggcatccggatagtaatagaacatggaccaactacaccctgtgtaataacagcacgcatgagaaagtgaagacagccctgaatctgttctacctaactataattggacatggattatctattgcatctctgatcatctctctcatcatatttttttacttcaagagcctaagttgccaacggatcacattgcataaaaacctgttcttttcatttatttgtaattcgattgtaacaatcatccacctcacggcagtggccaataaccaggccttagtggccacaaatcctgtgagctgcaaagtgtctcagtttatccatctctacctgatgggctgtaactacttctggatgctctgtgaaggcgtttacctgcacacactcatcgtggtggctgtgtttgcggagaagcagcacttgatgtggtattattttctcggctgggggtttcctctgcttcctgcctgcatccacgccattgccagaagcttgtattacaacgacaattgctggatcagctcagacactcatctcctctacattatccatggtccgatttgtgctgctttgttggtaaatctctttttcctattaaatattgtacgtgttctcatcaccaagttgaaagttacacaccaagtggaatccaatctctacatgaaagccgtaagagctactctcatcttggtaccactacttggcattgaatttgtgctttttccgtggcggcctgaaggaaaggttgcagaggaggtgtatgactatgtcatgcacattttgatgcactttcagggtcttttggtggctactattttctgcttctttaatggagaggttcaagcaattctgagaagaaattggaaccagtataaaatccaatttggaaatggcttttcccactctgatgctctccgcagtgcatcctacacagtgtcaacaatcagtgacatgcaagggtacagccatgactgccccactgaacacttaaatggaaaaagcatccaggatattgaaaatgttgccttaaaatcagaaaatatgtatgatctagtgatgtgaaaatatataaaatcacacacttgaacctatgattttatagccaaaagattggatagccagcaaatggatttctggaataccatgaagaaagccctcaaatgaaatgggaattgtatggataaatgtttaacaaccctctctctatgggggagaaaagcctcaatttatattgttggccagtaactactcctaccataactgatttcaagttaccaacctgacatcactgaatgtgtaattggaaagaaaataagcacaaacaactcccaggagctgacatgttctggaacctgcacagcactgcatgccctcagagatggaagtctgtgcacactctcacccacactgaccagaactctgctcttctcatctgaggagacctcactcggacttacagacatgaaaggaaagtttggtttttgttataaaactcctcatccttttgtcatttggtgatagtgaatggtttgtccagaaacactttaaccctctttataacttctcttgtagactagacaaagagttcattatctctgtggtctcatgttactttctttaagaaaagcaactgagcagaattcccatgggcttcttagttgctgctacatattgttgtatcctgtggtatatgcactctgaatcactagggagacatattggtagaagctacaccttgtcagctctctctctctctctctctctctctctctctctctctctctctctctctcggcaagaataggaggaaatcagttttctggaatctgtaaatagaaactttggcctttccatttctactgtgtagataagtaagtgatcaaccattttacatgaagggaatcaatgaaggatttctttttatcttgggaatctgagagagagagagagagagagagagagagagaaagagagagagagagagagagagagagagagaggttgtacaaatgaaactgtaagtactctgtaattttattttattgtttcaattcaaaacacaacctaggtaacttttaaagcagatagatgatgcaacattatatgcaacttagtatctgatactgtgtctgggctgatttattttatagtaaaatagaatcatgaattctatacttggtaaatattttaaggacaaacagataccagcatcagaagtttgagaactaaaaacaaaccccagaaatatcaatgataagatatgaaatatttatttaaaaatgtaaagccataattttacaagcatgatatatttggtgtgctgacatactgcttccaatatgacatattccaatttgatgacaactcattcaaattcagaaattatgaacaactactgtaagaagtgctagtctgctacatttgtgggctttaattcactaaattatagctttactgatttttactaaatgaagatacatgcttttgaaaaagacccaggttattatttttttatgaaccacagaggaattttctctatgtaataacactgtttcagtatttcagtagactactgtggatgataatacaagccacgggaagacttgaacttaccactcattgaggatgaagtgtcagatatttaagtaataattaaattaagacagaagaagattttgcttgtgagtttaagtgacattttaaatggatttagtttttccaatattgcttggtttggagtttctgaagaacaagattgacttcagttagtaaaagtcactctggggacagttacatgagtccatgttttttaaagtgtgtctgtcagtttacagtggatgagaggagtgactcagccctcactcattgtcttaagctatagaagagaataaattaaaaagttgtttgaaactgtcaaggaaaagaattcaaattatcaagcactgatgtattacatgatctgacagacatatttgtaattttctttttttttttttctttcttttttttttatatttgtaattttctgaactttcagctgcttaaaccgtacaaaccttccttttaataccttcagactttaggtattgattattcatatcttcgctgacagtgttcgtgtaattctgcattcttctaaacaaactgtcaagtattaacaataaatggtagtacagaatgccgaattaccagagaacatacttaaaaggtattgtaattttaagttttattatttttttactataccgagtgtagctgagatttttttactgccaatatctactgtggtgtcattctcagccatagcagtctaagattagtcagtattagttttgtaatagtatttttgaagctggatttctctaaagctgaagtgccaattaaaatatttctataatgcttgtagaaaaaaaatccaaaaattttgaaagaaaacttctctggtgcctaaaaattaacttggggagtttttagcttttaaaagttgcatctattatttttctctaatactttgttagagtcatggctgacacttttagaagcgactttgtatttttttgttgataaaccagccttcctggaggttagtgttttttcaaatataacaaactgtgtagggtttaggagtagtcagtgttatacttactgtttagatattttaatgtgaatctattttaatttcctttgtgttttaatttgctcatagaaacattatatgtaaaacatactcaagttcacttaaaagaactcatattttatcgacataaaatctctacttaggttttatgagaatattaaagttgtaagttatcactcactttcacgcatcctccctggactatagagcaattgaattcctcacaaaattcttgcagcaaataaagaaatactttgcaaaat

SEQ ID NO: 420 - protein, 463 aa, Mus Musculus
MDKKHILCFLVLLPLNMALISAESEEGVNQTDLGVTRNKIMTAQYECYQKIMQDPIQQAEGLYCNRTWDGWLCWNDVAAGTESMQYCPDYFQDFDPSEKVTKICDQDGHWFRHPDSNRTWTNYTLCNNSTHEKVKTALNLFYLTIIGHGLSIASLIISLIIFFYFKSLSCQRITLHKNLFFSFICNSIVTIIHLTAVANNQALVATNPVSCKVSQFIHLYLMGCNYFWMLCEGVYLHTLIVVAVFAEKQHLMWYYFLGWGFPLLPACIHAIARSLYYNDNCWISSDTHLLYIIHGPICAALLVNLFFLLNIVRVLITKLKVTHQVESNLYMKAVRATLILVPLLGIEFVLFPWRPEGKVAEEVYDYVMHILMHFQGLLVATIFCFFNGEVQAILRRNWNQYKIQFGNGFSHSDALRSASYTVSTISDMQGYSHDCPTEHLNGKSIQDIENVALKSENMYDLVM

SEQ ID NO: 421 - DNA, 6542 bp, Mus Musculus
tccctccacttctgcagcaccttgacagcattgcagctcagttcatgaatggagccataggagtttccaccaactcttggaggccagcttagaacctggaggtgcatccaagggccggaaaacgctgggattcattccgagttcaaggtccaagtcgggcccaaataattttgtagatgaggaaacccgaggtgcagatcggggaagctaatgcgcagggtcgtccctaaacggagagcagagggataggccagggtattctccaaggagggagtcatcgggtacgggttttgggggtccatgtgttctgaagaaactggagccgaagccactgttctaaatctgctggttaggcttgccccagcaaaaacccggcactggcttttgtgaaaaactcgagactggcggctgctgagacctatttacgacaatttcaaggttccctgtgccttaaatcccaaactctttgcttcccgaccctcccgttcgagctctcggcgatcttctgagaaagtctgaggctccttagtaccttctctagtatgaactgttcagcctgcccgcaagttgtaactacgcaggcgccaagacagccaaccaaggaggctgcagatcgggtgccagaagctctagagagcttcagggcggagagagaaggagccaatggctggaaggagggagggtgggagctcccggtctcggggaggaggcgctagagatggggtgaaggggcgttcaggggctccgcgggtctaagtcctcctgggctgcggaagttgagcaaccgggaggcgggcttagggccggaagcaggaaggagggctcaggacgcagggcgccgctgccagccttgctgtcggccggtgggactgtcagtggccagagcaggatggagaagctacggctcctgagcctccgctaccaggagtatgtgactcgtcatccagccgccacggcccagttggagacggctgtgcggggcctcagttacctgctggcaggtgccacactgacctttgacccatttcttggggactctgacccaggaaccctatggctctttgcctgctgacccagggtagtggtcgcggtgcttcagttctgtctgggttcctgtggcgtagaggaaactagagaacccaaagccgcagggtaaaacagacgctcaccaacgccttctataccttcttccctaggtcgcttctccgattcacacgagctgtctgaactgggtaagttggactctgggctggggagggagaaggcttccagcggaaccttgattgaaggtcctgagcttccctctagatcagctgtccatcgcccaagacagttggtgtccccagagttgggcgacctgtgagggctctgactggcttctcactcctggttttgcttaggattaagcaactttcctgaccttgctagttcatcagacctatgagtatgagaagggcactgttgttctgtctagctgaaggaatacaagttcagaaaagtccttgatgtcaggaccagtgttcaagtgcccccacctccctgctgtaagggctctgtttgcttagtgggggtagtgaagatcatgaaaggatgagggggattttgaaaggtaggtgtgatgtagtccttcaggggggaccatctgaagagagcaaagatgagttggtgggaccacacatttggctgtttggaacatgacaggcagttttgagcagctcagtaaccagtgctgtccagcagagcaagggctggcttgtcactccaatcagctcatttcttactggctcagatgtcatcatggagagaatggggctctgaggtagtgggcggagaggcttgttggtttccacacagtctgtgggtagctgtgatcggtagggctctggggtaagggtgagaggggtgaaggccacagcagggccggcctctcaagaccacaatctgcttctcagtgtactctgcctcgaacctgctggtgctgctcaatgacgggatcctgaggaaggagcttcgaaaaaagttgcctgtggtgagaactttgccaggagctgggggtgggaagctcagggacttgggaggaaaacagtaatgaccagcacgtgtggtacatgtcgttgtctcagagagtgaggcatgcccacatgagccgcagatcaattgttggtagtctcatgcatgaagtttcttttcttttcttttaaaaaacaaaataaaacaaacaaacaaacaaaaaacaaggctgggcaatggtggtgcacgcctttaatcccagcacttgggaggcagaggcaggcggattttcgagttcaaggccaccctgttctacagagtgagttccagggcagtcagggctacgcacagaaaccctgtctccaaaaaacaaactaaatcctacagatgtctttttttttttttaaggtttatttattttgcatatatgagtacactttagctgtcttcagacacacaccagaagggggcatccgattccattacagctggttgtgagctaccatatggttgctgggaattgaactcaggacctgtagaagagcgtctctccagccctcatgcatgaagtcttagagagctagaaaggcctgtcccaggccagccagcctggtagcaatggatttggtattgaactgaggtgttaggcttagaaaggaggaggcccccacctgctggagcagcctgctttttctaagacagcacttggggtagagaagctccctgacctctgggcttcttgcagtcgctgtcccagcagaagttgctgacatggctgagtgtactggagtgtgtggaggtgttcatggagatgggggctgccaaggtgtggggcgaagtaggccgttggctcgtcattgctctcatccagttggccaagtaggttgggttgtggagggcaggactgaggtggggtgacccagtccagcaatgaggtgctcagcagagcagccttgctacctgctttctaaccgctttcccctaactgccataatccccaccccagggccgtcctgcgcatgctcctgttgatctggttcaaggctggcattcagacatcaccccccattgttccactggacagggaaactcaggcacagcccttgggtaagctgcttctctcccaggagtggagtggggtgtgggactgctctgaggctctgcagcacatttcctgtcagctcagtactcccatttatttattctataagaaagaagaaggcaaggtttggagaaaatgagaacttaaacttgggagtttatttgtttgagctcctgccggtcaaacccagtgtcttgtacatgcgagtcgagtgctctaccactgagcttcactcccatccctgaacttgggacgtgtgcaagagtccttcttttctgttgtaggctacaggaactagggatagcgcaccagcacaaggtaggtgtcctgccaaaattgtcttgggcctggttctgtatcatgaaccgtatcctcaagaggcagggcacctggctgctctgggcccctccgtcagcctccagtcttcccccttattttgaaaggggacagtgatgtgaacttgaccacaagagatcgagagaatgcagcctcacagtcctatagccccgacagatgttgatggggtgggccctcctatccttcctttagtatctttaggctcttggttgactgactgtgcgtgaggatggcctcttcctgggccagggtaggtgccagagtgcttccctctatggaaagatttttgccaaaccacggtctctgggtgtgattcccttagttcagctgctgcctgaggccaggctcttgtgctctgtagatcctcaagcattcactgtacacatgttctctgcaggctctgctaggaatgtgtccctcttacattatgtcctgtttatgcctgctagatggtgaccacaatccgggcagccaggagccatcatatgtggggaaacggtcacacagagtggtgcgaaccctccagaacagtaagtggaagatgtagctggactgggcacctaggtgctgaggtcagtgtgagcccgtaggactggcttctgtcagcacccactctggctcctggctcactgaccttgtctttatattctaggcccatccctgcactcacggtactggggagcccctcagcagcgggaaattcggcagaaacagcagcaggaggaactgagcacacccccaacacctctggggttgcaggagaccattgcagagtctttgtacatcgcccggcccctgctgcactgtatccttagctgtgctggtggcgggctggggaggagctgagctggaccctgcactgcagatatccttgacatcttgaccgtcagtgctcagcctgggcttatggggtcagcgatcgtggacaccctggctactgtctggtgtggtagatatgactaggtgagaatgggtgaggatatggagttccatggggctctctgcttgctgtgtggctttttctttctcagagtcataggtcatccttgtccctatgtcccttcccctacagcctgagtctcctgagtgacaggaagaacttgacccggagggagcggctagaactgaggcgtcgcacaatcctgctgctatactacctgctacgctcaccgttctatgaccgcttctctgagtaaggatagccttcctcccatcaccagggtattccgtgctgcatggagagggctggggtctgctgagtaactgctggctctggtgctatttagcctccagagccacatggcctgccctcaaaggggacaggccagtgtgaattttcatacttggtgttgagagactgctgacagcagggtacaagatctgcagggcacagttggtgcagactgcccctctccagttcttttctccatgggacatccacttcgcagagcaggcgctatgcttcaaaggggctgggcaactaagcaggcctccactagactgttactgctgggcccacccaacactgatcaactttgaggatcagagcccctgcattagccagagaaatctctgaaaaaggcctgccagggcactatgacatatggtggggtgtctgagcaggagctgggctcatgtcctcgcctgtaaacagggacagtgttggggcccggctgataggttttatagcatgcggtaaccgaatgtgtttgcctgtgcttgatatataatgacgtgatgttaggtcttgtccccccgaggactgctggggttcaagccgcaggcctcaatgctaagcacatgaaccacatctccaacccgccccaagttctcctgtggaaatcccctatcttaagcctctctctgaggcagaggggaccttcccagaccccgcctactctgagcattggctggtgaggtttctgtgtagttctgctctttcaccagcttccttccctccggaaacttccagggtacagaccttgctctgagtggcccctaggaagcactgttgttgaataccaatggtaggaaggtagaaaagagaggaggggaggggtatgagtgacgtctgccagctgacaatctgacagctgggaacatggggtgcagctgtggacaagcagacttccggtggtctagcctttcgttgggtcctagtcccttgttttctgagatgcctggtgctcagtaaaggcctttagctcctggtcagcagggagccgccccgcctgcccctcagcatgctgttcttttccccaatcagagccaagatcctcttcctgctccagctgcttacagaccacatccctggcgtgggtctggtggcaagtaagtgtggtaggacaacgtggtgtgggatgtccctgaggcacaaagggcccgttttaatgtttgctctgtccttttttggtgtgattaatgggcagtcaggagtgaacctgaaatcagtactgggaggtgacagtgccagggccgaaggtggcccatggaggtggggctgtggccagaacagtgcctgtgttggattattaggccatatcaggttggcaagcctcctcctgcctttgggacctgcatatttggaggcagacttatctggtaaggcaaggaggggccttggggcttgcctgggtacccagccataaaggaagacatgctgagcatgttccctggcaacctgggcaccttgtctgtgacctaatctctaacatagcatcagaggcaggaggtgtggtctcgagctgctctgctggtggcagtgtcagaacagggcacagggcagggccaggggcctggctcctctaaccccgcttccctccattgcagggcctggggccaggggcctggctcctctaaccccgccccccatcccccttccctccattgcagggccgctcatggactacttgccctcctggcagaaaatctatttctacagttggggctgacagccatgagggagctggggcagagggccatgtgctgtgctctgctgctctgggcagggcccctcagccctccagttcccccaggcccctcttctctaataaacctgactctggtagtgtcc

SEQ ID NO: 422 - DNA, 1168 bp, Mus Musculus
tccctccacttctgcagcaccttgacagcattgcagctcagttcatgaatggagccataggagtttccaccaactcttggaggccagcttagaacctggaggtgcatccaagggccggaaaacgctgggattcattccgagttcaaggtcgcttctccgattcacacgagctgtctgaactggtgtactctgcctcgaacctgctggtgctgctcaatgacgggatcctgaggaaggagcttcgaaaaaagttgcctgtgtcgctgtcccagcagaagttgctgacatggctgagtgtactggagtgtgtggaggtgttcatggagatgggggctgccaaggtgtggggcgaagtaggccgttggctcgtcattgctctcatccagttggccaaggccgtcctgcgcatgctcctgttgatctggttcaaggctggcattcagacatcaccccccattgttccactggacagggaaactcaggcacagcccttggatggtgaccacaatccgggcagccaggagccatcatatgtggggaaacggtcacacagagtggtgcgaaccctccagaacagcccatccctgcactcacggtactggggagcccctcagcagcgggaaattcggcagaaacagcagcaggaggaactgagcacacccccaacacctctggggttgcaggagaccattgcagagtctttgtacatcgcccggcccctgctgcacttgctcagcctgggcttatggggtcagcgatcgtggacaccctggctactgtctggtgtggtagatatgactagcctgagtctcctgagtgacaggaagaacttgacccggagggagcggctagaactgaggcgtcgcacaatcctgctgctatactacctgctacgctcaccgttctatgaccgcttctctgaagccaagatcctcttcctgctccagctgcttacagaccacatccctggcgtgggtctggtggcaaggccgctcatggactacttgccctcctggcagaaaatctatttctacagttggggctgacagccatgagggagctggggcagagggccatgtgctgtgctctgctgctctgggcagggcccctcagccctccagttcccccaggcccctcttctctaataaacctgactctggtagtgtcc

SEQ ID NO: 423 - protein, 241 aa, Mus Musculus
MEMGAAKVWGEVGRWLVIALIQLAKAVLRMLLLIWFKAGIQTSPPIVPLDRETQAQPLDGDHNPGSQEPSYVGKRSHRVVRTLQNSPSLHSRYWGAPQQREIRQKQQQEELSTPPTPLGLQETIAESLYIARPLLHLLSLGLWGQRSWTPWLLSGVVDMTSLSLLSDRKNLTRRERLELRRRTILLLYYLLRSPFYDRFSEAKILFLLQLLTDHIPGVGLVARPLMDYLPSWQKIYFYSWG

SEQ ID NO: 424 - DNA, 1659 bp, Mus Musculus
gcaaaaacccggcactggcttttgtgaaaaactcgagactggcggctgctgagacctatttacgacaatttcaaggttccctgtgccttaaatcccaaactctttgcttcccgaccctcccgttcgagctctcggcgatcttctgagaaagtctgaggctccttagtaccttctctagtatgaactgttcagcctgcccgcaagttgtaactacgcaggcgccaagacagccaaccaaggaggctgcagatcgggtgccagaagctctagagagcttcagggcggagagagaaggagccaatggctggaaggagggagggtgggagctcccggtctcggggaggaggcgctagagatggggtgaaggggcgttcaggggctccgcgggtctaagtcctcctgggctgcggaagttgagcaaccgggaggcgggcttagggccggaagcaggaaggagggctcaggacgcagggcgccgctgccagccttgctgtcggccggtgggactgtcagtggccagagcaggatggagaagctacggctcctgagcctccgctaccaggagtatgtgactcgtcatccagccgccacggcccagttggagacggctgtgcggggcctcagttacctgctggcaggtcgcttctccgattcacacgagctgtctgaactggtgtactctgcctcgaacctgctggtgctgctcaatgacgggatcctgaggaaggagcttcgaaaaaagttgcctgtgtcgctgtcccagcagaagttgctgacatggctgagtgtactggagtgtgtggaggtgttcatggagatgggggctgccaaggtgtggggcgaagtaggccgttggctcgtcattgctctcatccagttggccaaggccgtcctgcgcatgctcctgttgatctggttcaaggctggcattcagacatcaccccccattgttccactggacagggaaactcaggcacagcccttggatggtgaccacaatccgggcagccaggagccatcatatgtggggaaacggtcacacagagtggtgcgaaccctccagaacagcccatccctgcactcacggtactggggagcccctcagcagcgggaaattcggcagaaacagcagcaggaggaactgagcacacccccaacacctctggggttgcaggagaccattgcagagtctttgtacatcgcccggcccctgctgcacttgctcagcctgggcttatggggtcagcgatcgtggacaccctggctactgtctggtgtggtagatatgactagcctgagtctcctgagtgacaggaagaacttgacccggagggagcggctagaactgaggcgtcgcacaatcctgctgctatactacctgctacgctcaccgttctatgaccgcttctctgaagccaagatcctcttcctgctccagctgcttacagaccacatccctggcgtgggtctggtggcaaggccgctcatggactacttgccctcctggcagaaaatctatttctacagttggggctgacagccatgagggagctggggcagagggccatgtgctgtgctctgctgctctgggcagggcccctcagccctccagttcccccaggcccctcttctctaataaacctgactctggtagtgtcc

SEQ ID NO: 425 - protein, 336 aa, Mus Musculus
MEKLRLLSLRYQEYVTRHPAATAQLETAVRGLSYLLAGRFSDSHELSELVYSASNLLVLLNDGILRKELRKKLPVSLSQQKLLTWLSVLECVEVFMEMGAAKVWGEVGRWLVIALIQLAKAVLRMLLLIWFKAGIQTSPPIVPLDRETQAQPLDGDHNPGSQEPSYVGKRSHRVVRTLQNSPSLHSRYWGAPQQREIRQKQQQEELSTPPTPLGLQETIAESLYIARPLLHLLSLGLWGQRSWTPWLLSGVVDMTSLSLLSDRKNLTRRERLELRRRTILLLYYLLRSPFYDRFSEAKILFLLQLLTDHIPGVGLVARPLMDYLPSWQKIYFYSWG

SEQ ID NO: 426 - DNA, 67935 bp, Mus Musculus
  misc_feature (1)...(67935): n = A,T,C or G
cgctgcttcatgacagaaaccttataggctgtttgactggataaggactccaaacgtgcgaagggactagatggacgccatggtgacggacagctagggaacgggaggtgagagttcggccctctgtcgacaacggggtgctggaaggcaagagtatcaggaggagcgctggcaaacccgtgctcaaaagtcgctgcagcttctcctgggactcttactagggtaaccctgtcggaggcacataggcttctagcccgtatggttgcctggaagcagtagttggaagggaaaccgtggatgaggtgtctctactgactctgcactggatgtatagaaacgagactcagaattgcgttctgagggacacttcgcttgttgggacaagaagttaggaaagtctttcaaaacagaaagaagagtctcagaatacctagcataaagcggagaaacagcttgaaattgaccccccccccccgcgctggtgcacatactaaaggaagtgtagtaagtaattaggcggttgccagggatactttagagcccaagcccgtccagtcgcagctttctttcctttttgttttgaggattctttcagggaaacagaggaagttctttaactaacccccacccccaccgccccctaggaaaataaaattatcccgttttagttcacttttcagctcatgaactgtgagatgactcgagtaattttatattgaatacaaagagggcctcctttcatactgctgtcagataaagtaagcttggtaagttattattacctaccttagagaggtatgaagtgtacttcctgcttgtggatgtgaaatactctttcttattttggcactaaatgttggaacaaaataaaatttacttttaaaagtaagttgtttaaaaagcatcataagacaatggtcaagattaggactcaacactatcagactagattcaaatcctggctgccacttagtcactacatggctttgagcaaactgtttaaccaactctctgtaactcgattttctcctctgtaaaatgaggtgattttacccacatggattgatgtcaattatgattagtaatttacgacttgtaacgaactgagaacagaccttgtacacagtatatagtagataccattgtccttgaactaatagatagcaaggctgtttttatctgctgataatgagagcatacatgagagatgctgcagatgattagaagggactataggatgatggaatttggtcagtggatgtagacaggtaaaccttttattcttagtttatttttctttgacagtttcatatagtttattcttatgattcagccccctcttttatctccctcctgtccctgccaaccttccctccttcctaaaatttttttctcacatttcctacattaatatctttttgtttgagttttgacccctgagtttaaccagaaacatctgtgtggccatgggtttggaactatccagtctctgtgtctctctgtctctgtctctctctccctaaatctttcagtagtcagttgtgcagcagaatggggtatggcctcatgtgctcccctctaagcaatgactgcctgttatatagggctggtcttgtgcaggcccagtctaggtattcatagcaactgtgagttcatgattccagtgggtgtgtcatcttaaagatagcatttcaaagcttctctatcttctggctcttaacatcttccaggtccctccattctttcaagatattctataggtagcagaggggatggtgtaagtgctaaacttttgaaccaataatagttggataaatgtataagccaaagagtattggtgactcagtgtagataacaaaacagggcatttctttcttgtcgctgtgcatatccatcactgtgtatacaagatctaaagttgtggtttacaagtctaaatctgggatgttaccactttgtgtctgttatcaactttggcaacttattgtctttcttttacctgtaaattgggataatattaatagctattcattggattgctttgtgaagtaagtgagcacatgcaaattataaggcacaatgactggttcacagaaattagtcagcaaatgttactggccactatgtttctgtttcccctgcaaatgtcccttgagccatgtaatatctgtgattgctctatcatatatattttctagcctgaagaacttctagagtttatatgtcattaacttctaagcaatttctcgcagccagagagtcctcaagatgtgatctattaatattcatttgtggggtaaatcatgtgaggaaatggtgtctgagaaagagtatttctgcagctatgaaggcaagccttccatttcctcagactgtgattgtagatccagcagcttgctctgattctgaaataacttagggaaatgtttaatttattcctgggctgttcacatatgcgtgagggaggaccttctatcaactgagaacattctgcccataggtactaagcgaaagcgttaacccctaatccagtagggaaaaccctgggtgccctgggtggttacactctccatgcagaatgattatttccagacatctgccccatctttgacagaggcagcactgagtttgaagctcctttagatcaaatacctatgaaaagcaatacagaattataaaactgcttgttctatacaaggggcaatggattccagatcccaaggacttaacctcccccccccccaaaaaaaaacccaaaccccagcttaaattatagcctgctgtgtcatgttacggttgtcttagggattttggattattatggattaaatagagcatattctcagataatgcacaggtttgtaataaacttggagccctcaaaacatatgtgtaataaacttggagcccttaaaagcagcaaagggctgttaaaaacatcgtctccttttggaacagagacaagtgtttgcccatttaagtcttaggtgaggcagtttagtcagaggatttgtgtgtttaaataatagaaacattggagggatgtgagcgtttttgacgcactgagttgttgaaagtttggtttatgggctggaatcgattttcactggagttgaagagtataccttttccatggttttaatataactacattagttacatctagggtttttaaaattgtttaaaaattatgttagatctaaaataacccactgaaggtttttctttaaatagacataaaaaaaaaagattgtgttcttcaactgagggaaatttcaaagtcaacacattaaagatgctttttgaaaggaagaaatccaggtccagcatccttggtgccgtgtcctcagtcctgtgctagcattccgcagcagggcggttttcacctaagtcacctttaagcaaggccatagttgagtatcagaagggaactaatgagctgggcggtggtggtgcacgcctttaatcccagcacttgggaggcagaggcagaggcaggcagatttctgagtttgaggccagcctggtctacaaagtgagttccaggacagccagggctataacagagaaaccctgtctcgaaacaccccccccccccccaaaaaaaaaggaagggaactaatggtgtgaggtctgggtttgtagtttcctgtgtctgaactgactttctctccaacgacagatagtatatactctgaagcattcagtcttaccgatcagcattgcttatgtttcctgattccaaaatagcaagtacgcccatggactgctgctatgtagtgtgagttaactaacactggtttgcatggttaatcaggtttgaggcacacactatataatttctgctggcaataaaccaggattaggtctttattcccacattgatgccacagggtcatttatctgacaagattaataatagcgccccaaaggaattagtcattgcagtagctgaataccacaaccatacctccaaaatctaagacccgtctcccttacccagatgctctgccctcttgtagccagttgctttagtgtggcatcggcagccccttaaagtttatcaacataggtaaatgtttatcttttctagaaatgaaggtattggacctacctgaaggccagaggggctgcttatccctctctgaatcctttcggccaagccaggaattaaactcggcacttggggaagagtcactgtttagtttgtgccaagctgaaggctgcagggtagagtgtttgtgtgcctacagatgttccagtgagcactggtgtgctggtgtaacgggagtaactgactgtgacctccttccccctccctgcacccctgtgatggttgagggagacagaaacccaccagggtgttcctctcaagtttaaccttttcattactgacagattgaaaatgttaagtcccgagataccagtcatttgtaaagacaaggtctaattgaaactcgatttgttaaaattaaaaacattttagaaaacccacaaaaaatgactgtcttaagcttggtttaagtgaatactattgtgaattaaatgggaaattatctgttctgaagcagagatcagaatgtctcttttatggtttgccttagtgcagactaaggagtaagggttctacatattggagacctctgtctgctttgtggctgtgtgtaacattcattgtgatgcttgtgaatacagggtttacttaaccctcaagcctaataaagaaatgtgttaccttacatgacaatttatgaactgtcctcagtcagaggcagcgttgtaactttatatggacttgttagcagaacctcctttacaattctaatagctgtgtgggatttcactgagcataaacattgagtataaaaggaccttttctgctttgtcattcagtcagcttccacaaagcttagatggccacagatagtgacgaggggtagacagatctggtagggctttttcttccatcactcataatagagttattcttttgagcttcaattttcttatctccaagataagatctgaatgtttctgaacagaccatgtatggaaaagtgggcgtgcataataaatcttgattatgagggtgagtggtgttataggtatatttgtatacatagcgacttaattttatttgaaaatgttcgatctggtttcaggattgactttcttcttttttaaatgcatgtgcagctccgttcctttgttgattcttctcatctgaaaatgttggttcaactatcattgtctagttatttccacgatgatttttgcttgtctggaggagcacatttggctgttttcctgtcagtaccattgtgtgagttatgatgtctgaaactacagcaatggtggcaacactcataaagctgatgttctagatggttctacagtcttacaaaacagatttcacttaatattatgagctgaaataagtagcttatgtcaagtgttttagtctttagattgtaacactatcattaacctggcagtttttacttagtctttgactaggttatctatctctggaggtgactggaaactagcatagtaatactctcggagccatggtttcactttccttgtatgtgtctgttatgttgaggccgaagaatagtcatcaggggtctaaaggtattaaatggaaaatcccagacataagccaattctgagttttaaactgtagggtgccctgaatagcacaatgaggtcttgtagctttctactgcatcctgtgtgggacataaatcatgcctctcacagtgtgttcacacagtgtaaagtaccctcctgctttcactcagtagcttcttttgttaactgatcaaatgaaatgtcattatagttatcccattcaatacccttgctttgtttaatagtggcccaaagcagaggggtggtgaaactggaaatttggatatgacaaaggtgaactctaaagtggttcctgtaagcatagtctgaggaagtgttatgaaagagagatagaatgatcttatttatataattttaaagtagtgaagagctagttctattttattgtgtgggttttgtttttgttttttttcactcttacttataagtaagagaccttaacttatacattaaactgtattgtaagtatagataggaaaagtgtcagcgtagagtctgataacccttcagttttgggaatccattggaggtttggaacaggccctttgcattaaggggaactagggacttaaatcctaaatccatgttcatccatggattaactattgattagggaaaagaccaaacaaagaaaccttgcaaacctaggccttgcacttaagcagcatatattatactggagtgaagcagccatgattgtacatttacgtgtgtgtgtgtgtgtgtgtgtgtgtgtgtgtgtgtgtgtgtgtgtgtatgtgtgtgtatgtgtgtcccagggattgaactcaggttgtcaggcttgtcagcaaatgcccttccctgctaagctatcttgccagcgaacacaccttatgttcttcccacattcaactttccttcagagttcttagatgtccatcaggaaatcacagttttaggctgcttagctgattttaaaaccttgaggcagaatcagattccatctcttactggaatgcattgatttatcccttttcaaatcaaaaaagaggggagaactaaagaatacaagtcaatttagttacagaattaaaaatagctttatttcatgggagagataaaagacttagtaataggatagactgacattgtaattgaacaataaagaaagcataattggaaaaaagaaaaaagctggaagacagcgccaagcccagtgcctttgttttttatttaaacttcgtaaggacaggcagttaactaactttccaacagtagcacttgtgggagctggtgggagcgtgctggcgggttggggaaggcagaggaggagcaccaccagtttgaggactctcagctttgctccctttaagctggtccacctttgttctctaagtggaggaacagcttcatgatagcatgggaacaaggcgagcagcatcttctcatggcccggggataggcatggctcttatgactcgggtagtgggagctaatgcttagggaagctgtagaaatagtcggaggaagggaggacgacttgtcaggtgaattgagaactggagccatggctgaaactgacaaaagagaaaagaggaaggaaacggaagtagaaaaggatgcgatctacagttagggtgacaggctgtcaagagcagggcatgtcagatgatttgtcactttttatttaaagcaattaagtaaagtcccctgagcagaaggcttggtattttattgtaaatgttccctactctctgattcaatatgaggtcgttgctttaaaaataaagtggcaaaaagatgtcagagttttgtaatgtgctaggaaaaaaaaatcattaaaaacctttcatttttagagaaagaggggtttgtgatcctttctagatagagaccatgtaggcaaagaagtttgtatgtatgcacacgtgtgcttagttgtgtatgtggaggcaaaactgtgaatagaagcaatgcattctgtctcaaagccctttgttattctacagtcataggagtctagaattaaaaatagctgagatgcaggtctcaaaaatctgattttttttaagagaatgccaagtgaaaaggtcaattttatttgcaagatctggcattttgaaacacttagaaatgtattcctgcaggccgtgttgactttgttccttggtctacagctgctcctgaccagctgggtgggttttgtttaaagctgatgttctggaattgtaaaagtgctgtgcactgtgcaggtggcaggtgagcagaggggggacagttttaactaagcagtgtgcctctgccagattgtcgtgcaatgcagttgcagtaagtgtcaccagggcattgcataccatgggaggtgggattgtgttcgagctgatccctctcttaagagtggaacactgtacagctttggagttctaaagttgtcttggatacctctgaattagaagctctatgaggaatggtgagaaaaaggttcacagaagcacccgttatcttctgtgaaatcactaatacagttgatggtatctctgaggctaggatgtcggctttgaatgtgattgctaagtgtgcaaacttttctcggtcacaactgtgcttgcagaagtttagccaaaactaagggcagggtgtttatctatgattctacatagctgtaccttaaatacaaagtgaaagaggcatggcagtaagaaggcaacctcctgatttcaagaacagttcctgcaggtatagttagtcagctttgagtacagttagtcagctttgagtatagttagtcagctttgagtatagttagtcagctttgagtatagttagttagtcagctttgagtatagttagtcagctttgagtatagttagtcagctttgagtatagttagtcagctttgagtatagtcagtcagctttgagtatagttagttagtcagctttgagtatagtcagtcagctttgagtatagttagttagtcagctttgagtatagttagtcagctttgagtatagttagttagtcagctttgagtatagttagtcagctttgagtatagtcagtcagctttgagtatagtcagtcagctttgagtatagttagtcagctttgagtatagttagttagtcagctttgagtatagtcagtcagctttgagtatagtcagtcagctttgagtatagtcagtcagctttgagtatagttagtcagctttgagtatagttagtcagctttgagtatagttagtcagctttgagtatagtcagtcagctttgagtatagttagttagtcagctttgagtagagttagctagtcagctttgagtatagttagtcagctttgagtatagttagttagtcagctttgagtatagttcgttagctttgagtatagttagtcagctttgagtatagttagtcagctttgagtatagttagttagtcagctttgagtatagttagtcagctttgagtatagttagtcagctttgagtatagtcagtcagttttgagtatagtcagtcagctttgagtatagttagtcagctttgagtatagttagtcagctttgtaaagccagggagcagggggagaggaagtgcagatgcttagtcatgtgtgttttctttgttttatgttattaataatgataattaaaaatactttctatttagttggactgcttcaatttcttaacactgaggtttctgggctgacttcatttgctgggaggaaaaacatattttggggagataaaattgatttcatgaaatctgctgatgagtagaaaggcttaatgaatggttgcctcaagaaacattattatagtggcttgggtggatgagcaggaaaagaaaacaaactttccaagcagagtgtttctgcttaagcatgtagtttattaataacattagtgtttttcctgccaccaagtgtctctgcaaggagaaagccgtcagcacgccagagcccatgtcctcagtagaagtcccagagctacttttccgtccctaaatctctttggctttaattgccttacctttctttttgcacttctaaatttttaattttgaaatgaccacaggataaattcataggtggctgcagagaagtgaacagagaagccccatgcatccttggtctagccttctgcaaagttaacatcttgcgtaactaatataaaatttgagaaattgatattggtgtgaaccacaaaatatatttggatttcatcagttatgtgtgcatccatttgcgttacttgtgcctcaattacatcatacggaattttgcataatccacacacagctgtacagcacaagacttatggcaaatgtccttgtcccctcctaaacccctgccctagtaatcacgaatgtgttctccatttctaaaattatatattttacacatgtcacaaatggaggcactcatatataccttttaatcttggcttcctgcacccagcctatatcctttgaaatctaagttgcacgaatcaacagcttgttttcatcatattgcttactagtattccctagtgaggatgcaccacagtttggttagccaggcaccagttaaagtatatttgagtagcttccagtatttggttgctatgaataaagccacagtgaacatcagtgtccaagtgtgtgaacgaaaatacttctgtatttttctgatagttgtaataccaaccatcttcagggtttccatttgccattgtgtcttctcttggctgaagtgtctatgtatgtctcttgtcttttgaagttgatgaaatgctgaatttcatgagggatttgcgcattctagatgctgctcttttgttgagtatgtgatttgttagtattttctcccagcttttatttgcatcttgataggtcttggcagaagagtacttttagtttctctttaagtgagtcagatttttctcctgcgcagcgcactttgggctccagtttgagaattactcttcaccgagcccgatggcctgaagactttccatttttcctgttttctttacagcataaattttgcctggatctgttattcctacttctattccttccataatttttagcattcttttgctcaatttcatgttcctgtaatttaaaaaccatcatggatgcttcttcatagtcattcttattagcaaagtgggcttttgtatagagtaaggaatttttaaacctctttaggaaggatacaggtgtgtgttgaagctgccattgtgatatctacagtcgcatatagcacttggcccccacttttttaactggtgtacagtcttagagccgttgtgctgctttcttcctcttttccataagatgctatgtttgtcaaggaaagtgggtagtggttaggatatccctacttctaagtccggggtctggaagacagtgcatctgtctttggaaactgtggtcagcagtcatcccaaagcctttcctacctccctcaaatgcttcctttactattcatcacagaggccgtgcctggggatatgggtccagatgcttacactctcatctctgggtgttaatgaagtccccctggctttcatgtgtgcaaaggcatgtcactagaagtctgcaacttgaagtgtgctgtatcctttgatgctcgttctgatgaaagaacaggagaggactgcaggttcttttctattctataaactatgttttgctttatatttctgctcttctttgttctctttttattttcctgggtgtatttactggtctatagatgtataggtctatatatttattagtctcttgagtgtacatatacactcattccctatgtgtattgaatttagatgggctgggttgtagctggaggcatgatggcattcatccaacattagttctgttgttttagttttgttttattcctcttgggagacaagcatgcatcaaagtcaagaagaattccaagtgggaagaggttttcagctgtactctacagttagaaggcagccaatcactttcactctagtttagttttctgatctgaacacatcatcacatttcattttccctctcatacagaagttgacaatctttctctctctctccctctccccctccccctccttccccttttcccctctctcttttagattataattacaccacttctcccttccctttcttccctctaaacctgctcatatgcccccatctactctccctcaaattcatagcctctttctttaatcactagttttttttgtttttttttttgttttttgtttttttgttccttcatgattctttgtcttcatggtcataagcatctcttgattgtttacaacctgagaaccgttcgtgactcatcagtggtagcagttgaaaaaccccaggtgaacttgcttgcccatattgttcatgttctttcatttgtactctataaactccatgtgacagttagctctgagaatccagaattcttaacaacaaaagaaaaaaatcaaaccaaaaccaaaaaactttttaaaaaagtatatgtatgactgtccttgtgtaggtatgtgtatgtgagttcaatgcccacagagaccagaggagagtattggatcccctggattggagttaacaggtagttgtgagatgcctcgtatatgggaaatggactcagatcctctggaagagcagtaagtgctcttagcggttgagcaacctctctagccccaataatctgaattttttcctttgttcttggtatgggataaagaatgttggtaacttgggggaaaagtgcagagttgctgcaggtcagccaaggaggtcacctcttcacctggtcttttctgcctcagcaaccagtcatcagaatgtgattccagtttagtccagtctcttggagactagactgcttgtgcaaacatgaaaggccagccacactttaaagaaccaagattgatggctctgtttccttaggcaaagtaaattacattgctgatgtgttctctccttcagtggtccttacttcctagacctgtaacacgcaggtgggctctgagaaacctggctcctcagacatttattgttctttccaagttgcagtgggacacattgtgggttaaaaacaacaacaacaacaacaacaacaacagtttgcagacaaatgactctctgtgtaggtaagagatcaggtagtgcaccgagaagaaaaaaatagttcataggggcctgtaatttaatgcttacaactcttgtcttgaacacttggttttgtttggatgagttcattactcaaggatatgaagatagacacctaagatgtgctaagtgggtggtgatgatatcacgctccacaggcattgtcgtatacatcttagtgcacatgctgctgcttatatgaccgttggctttattacttaataatacacaacaggacttctgggaggcgaggggatttttctcccatctctcggacagagggtaaggagaaaagacaggtcctaaccacgtggtttccaagtgacagtgatagccagagcagagtggtctgtattttgtttcctttccaaggctcagacggtgcaaatcctgcttatgatttactcacagccatttttatgcctttacttaccattatgtcctatgctttcatgttgtgctcaaagcataaatcaaaccaagacctgccccccccccaaaaaagggaatcttgttctagcaagcttctctttctcttttttcttttagaaaaatatttcatgataaaagcacactagcgagtgggtggtaaacgaaaagcatgctttcatctagaaaaccactggtatttgcataaaccaccagactgtctggtaaagggtgatctgctgtgtcagtctctggagacctttaacagcaggttcctaatgcttttctaggtaaagaaaggtcgaaattggatgatgggtgctccttagggttttcaactttgactgtttgtgaaagtctttaaaagctaagaaatgcctggattgtcagacacacagaaatggaacgagaagcctcaaaggatttttgcctctgagctgtgtatagcctgttaattatttgtctttggtagtgctgagctgtattgagggtaaatattcaaagtataccaattagtgctctggaaggagccttaagggaatgcctatgactgctttttaacataactgtgagaggacatttgcagcaggaggaaaacctggccattcccatgcactgaggagactggctgaatgctttgagggagagattgttgctacgatactgtgctccaggtctggaacagtcaacagctgaggagattcttgcgttttcacacgtgtcctactgatagtgaactcgtcgtcactgaagaggctcttagttggtattcattctctttcagctgcaagccttctctaataagctttacgttgttgaagcctgggcattggtgcaggtgaaggtgttgtatgtgatgacttttcaggtattcagttttgaagtacaggtagcttaaaacagtgcctttgaagttgatacctaaacgactgttttcacgtggtcctctagcatcgtgcttcacgtgagattgggatggacaaggtagtatcttgtgggtagcatcagtgcattcaacgccagactggtctcagtgaaggggattctctgtcatcttcttcctcacagtcaccaggaaggctatgtttattaaggtggacacacatttcatcttcagggctatcttgtgagcttcctatagcttcacggtttcgtaaaacccatggagtcacgtgtgtttcagaatatattagattttattaaggcaggcagtacaaatagcatgcattgtgcagacctccagttggctgggaaggcacctcatatccagtcccattaagggacaggtggatagttccactgtagaagaaataacaactgcaaatgctctcatgtcaactcaggtcaggtttgtcagtgaatgagtttgaacagcataagaaaccctacaccccagccccacttagcatttgatgtttagaactgaggtttaggaaacaaggctgagccattatagtgccctttctagaaaagaggaacaggggttcagagatgtcaagtagctttctcaaaggtggtacacaaggagcagagtgggctgtgactgtgtagctgtgtgaaacagcaggctagatttctacttctagatccatagaatgtcatcgctcttgttatgtttaaaaagaacatattctttagctaaaaaaaaatctatttataaggaatagcatatattttcctgtttttataaaaagtccatcatcataaacgtaatagggaaagatttagaaatatatttactagactcctgaaagagcttaaggtggaactcgtagggtcagaggatagttaagaacatcgttaatgctttttcccttacacgttcctgtgtggtttgtattttaaaaggatgactacttctatagcagaaatacatttaaaaaggaaaatgggtgagaaaggttaataggtaatacatttttattctcttttaaaatgaaagataatagctgggcagcggtggcacatacctttaatcccagcacttgggaggcagaagcaggaggatttctgagttcgaggccagcctggtctacagagtgagctccaggagagccagggctacacagagaagccctgtcttgaaacaaacaaacaaacaaacaaacaacccaaaaaacaaaaacaaaacccaaaaatgaaagaaaatagctcttaaatgattgatttttattatttttaagtgtgtgtgtgtgaatgtgtgtgtgtgaatgtgtgtgtgtgtgtgtgtgtgtgtgtgtgtgtgtgtaagtatgtagaggcccgaagcatcagatgctcttggagctggatacagaggcagttgtgtccatcccattgtggtactggaaacaaacctctggtcctctgtaagaatagcatgtgaactatggagctttctccctagctccatctttattcttgtttcagatttttattcttgtttcagaaaaacagaaagaagcttggtgctgtcttttcttgccatattgtaaggcgaccccatatcccctttttattatcctgcatgtattactgtggtggtgtttattcttaatgtagatagtcaagtttccaaaagccttatcgaataatatttcatacagagtaaatggaattctgtcaggagccatcataggaaaagctaataactaccaggcaatcttcgtgagatgaatctaccttgaattaaaatccacaacggatttgctctgataggcaaggcccaggagagatgcgttttaggaaagatttctgctattaatatacttttcctgttattattgaatatataaaaatcactaggtattatctcacacctttaagcagatctctgcagaactatgaagatgtactatcttgtagtgatgctatatagacaaatagataatgattctatagaattcctgttttgattaaaataatttttgaagaaagtgtttagagatggttttagttgctagaaagatgtaataaaattagaatcaagaatagaatgtacacactcctcataatattaactcctcataataactcttaatagtaagtaaagcctgcataataagaaatacagtgagctttcagaatcacactaaaatgagaaatagacttgggacaattttgtgttcaaggaaaaacatttaggtccaaggataaagtcacaggtatatactataaggcacagccatgcataaaatgttgctttgaacttttaatgagtgcattataatgaaacactgctttgaacttaatgtcaacatccttctgaaactcccatttatgtaacattttatctctgaggtaattttctaagaactttttgtctaaggaggtataaaaagcccagagaaaagaaataaagtatttggttgaatggtttggcttggagagctttgccccttccacccagccatccattcaaatgtatatgtctgtttgtgtgcgagtatatgtgtatgtacagtagcatgcataaatacttgtggagttgattataacagatggtggggcccagccagagtgtgggtgtatgaatgtttgagtgcatatatgcctgtgtatatttgcctgtacaaagcaccttaattcttttcccttccttcctctctggttcataaagagtcaaccagccaggccagcaaagggcttctggctgtctggccagagaaaggagcactagaaataaatcctttcacctaattccctactaaacagtatgtgttaattgccagatactagtgcttattaaagcacaagtaataaagagttatgtttctaatgaagcacaggacactaagaaagggttaagtttccttagcacttatttaagcataaagagttaaagaaaacacagagaattataatatttaaggaaacacagagttaaagagaaaagaagccagtgttttctttctttcttttttttttaattaggtattttcttcatttatatttccaatgctatcccaaaagttccccataccaccccccaactcccctacccacccactcccacttcttggccctggccttctcctgtactgaggcatataaagtttgcaagaccaatggaagccagtgttttaaaaacatagaataagctagaaagtttttttgaacattttagaagttgtcagcaagcattcagtatagttagagagttagaaggccagagaccaccagtctttaaagcaacgtccgaagctgtgtcctacttcaagctcattccaggctgggcaggctcccagcagaattcaatcagctatgatatctggagtgaagaccaagttcaaactgcaaagaatgaggcagttatcaatgaagtatgtgcgaagaggctaggggtgttgtaaacatgatattcagttggataggatgagtacagtatttagaatgtgagaattagtttatatacacaccatgtccgagtctcagctctagttctggacgtcattttgtaaacacatgtaggtgaagtggtatcaactctttcccagcctattaatagattggagcttgatagggttcttgggactccctatccaaggtcaggtgaagtcacattggccaagttcagttgattttgttaagtctagtgacattttgaccatcattcctgtttagatgagcatccttagtgcacaccacaccctgaagtattaagtgtttggggtgcaagggtgagaagatgtgctcagtcttccatgactgtgagtgtagaagcagatgaagaattatgtcttcccagtgagtgtgctaatatagcacatggtggcatgagaagtcacagctaacttcccacaatggtgacaggtgtgtgtgtgtgtgtgtgtgtgtgtgtgtgtgtgtgtgtggtagaaaaccgcaactctgagctgagttttggaaaagaagtatgtcccaagaaatagaatgagaagagtgagatggttcagtttgactttgttcaagtacctgcaaggatgtcaggtactagaaggattaaaattattcaaccattctcactgtctcagggaacatttggggtaggttagggagacagattcaggctcacttttaggtgtttttagtagagttgccaatggcttcactgggatgtcagcattcgcagagctgggtgtgctaagatacaggcagggccacttcttgctaaccaagtactggtgtggtgactgtagttggagggaagtactgaatgctgctttaagggcttgaatccagggattggacaggcacatttggctctgtgaacttgcccatggttgtggaagctaacactgaagcattcattgttggccgtttctccataccagtccccatcactattgccactgtgtggagttgtggtggttagtgggtgccctttgagattttcctcacattggaagagttctagttttgagtcaaattacacgacattattcttgtgtcttaatcatataatgagaaagctgaaatccaaaccaaattaggtactgttaccagttcagcagcacaaactgctgaagtctctccctcttatgctggcgcccactgctccagctgctatcctcacccgtcttttgggccctgaatttctccaccacccctccatagtcgctgaggctgccttactctatagtgtctgcttttctgtgtcttgtagagtggccttgtgaattgaaatgcttgctcaaataccgaggccagagataatggatgaagatcagttaatgaaagaagtcttggataagtttgtcaactgccatgagcaaacctatgaagaatttctgagcactttcactcatctttcaaaaggtaaactatacaatttttacagcaatagatgaaataactttttaagtctatacctttggtatcttttcagaagactcgtgaacattcattgaactcttcagagcacatacttcttactagagaatttgtgacttataggtatggacacctatgcctttatctattcaagagttatgttgcagagtaagagacatctgataattacagatgagcagaggaattatttagctattcacttcattttattttttaagaaatgtaaatgcagaacagaggttgtttaaaagcacattttaaactaaggcactctacatgtctggattttgatgtgatcatttgccagctatttgactctggtaggtaagtgggactaatcatggcatctcactcaaagggtgtaaagactcaggctacactgtgcataactgagcagagtggctacaccttgtgtgtggttactattgctatgatgatggggatactgatgatgaaaatggtgctgagattgctgtaggcaggaacatcccttttatcctggggtgatataacctaaaacctaaagtcaatgtgtgcgtttcattatgtgcttgttcattctatgtagggttggcttttaattgaaccaacacttaaatgatcagtgattttatgaaaaaattaattctattctttttaggtcacctgaaaagctttggtgtctgattcccctcacagtgttagctggagctcaggacccctgccttggagtgccttagttccgaaagtgtgtgtgggtatgcctcattcactcatgagcactgcagttatgtccattttaggttctgttttcaggtgtcttgacttgctttcaatgctggccctttctggcctgtcagtacatatttgggtccatgtgacctcattgagcctccatgcagttgcacattacattcctttgagggtcgtttggacactcgtttcagagcctattctgaagctcagctggggccaaggagtcagcattttgtgaaagctcctctgatgatctcagtgtgtatccaaagttaagaacagggagtttcatatctggaaggccatggcctttatagtaaacctgatctgatttgaggtcacggcttgtgttctaaataaatgaaagaaaaaaaataaatgaaaggttaaggcaattctaataaagagaaggaaaatggactttgacatgtttgtttgattatttaaagtataggttgaacaatttgaaaatttgaaacctgagattcttcaaaattcatgattccacaggtagaaatgtccacatcttacctcatgtgttgctatactaaaatattcatgcattgaaaatactgtatgaagccgggcagtggtggcgcatgcctttaatcccagcactcgggaggcagaggcaggcagatttctctgagtttgaggccagcctggtctacagagtgagttcctggacagccagggctatacagagaaaccctgtcttgaaaaaacccaaaagagagaaaaaaaaaaaaaaaggaaaggaaaaggaaaatactgtatgaaattaccttcatactacagtatataaatcataaatgaatttcaagttttaacttgggtcattttcccctatatatattatatataaaattttgacactgtttcagtggagagagactgaactgtgtagatgtccaaagcctgagctactgccgaaggccctgttcatgtgctgctgtctgaggctgtgttgctgtctgtgatctgagttgcggccagggaccatgtgtgagtctgggatcctgctgcagctggggcctttgttggtgtctagagagcatgctgaagtctgtggcatgtgctgctgacaccagccagggggggactgtgtctgtgctgtcaatcatgcggcagtccatggactgtgcccctgctgactgtaaagcacacggaaacgttctgccctggtgtggatgactgcagactcgtagtagagaaagagagacatagattcccacccccacctcccaacacacacacacacacacacacaaagtaacgatctagacaggatgcctggagagaactcttaacaactgtgataaggatgctgaagtagctcatagacagtagacagcctctggctgaggtgggaatggggaagaggctgccaacaggagtttaatcatgctccagtgcctagatggacagcagaaattgaaattgaacttttttttaaagtcttttttttttttttttttttttttttttgtggcaaggccacagggatgtgtgggatggacatgggagaattggaaagtgaaggtgatcggggagcactatgtgaaattctcaaatagctaatccgaatatgtcaaaaacactgccaactccggcagtattggaatcttaatgtaatattgagttgtgtttctctgatagctgaagaatagtatccttgtatattttgcttacatctaaacaaaatgtagtctgtgatttttattttatttatatttaaatagagtggagatttagaaatattgattaatttggaaacagtgtgaattaattgtactgatatgatatgtggattacgtcagagtgacctttagtctgcaaacctggcttctctcatctttttgttaatagacttgggtttagaagttgcttccttccttgagccgagtgacttagtccttactttctgggcccgaactagcagtatgggtggctggcatgaggtggtccaaataaagactaaactggaagaattactgaattttgagtctatattactttgtatagtgtgtggctgattttatttttgtactgtgaaattgtaaaaccttaggactagcaggccctttatctagtccgtcttcagctctgatttggtcattgtatgccgagaaagaaactcctcagatgtagcgccttcctttagaggtcagcacgggctccagattgagctgaaataaatgaggatgcgagccacataaactgcagctccaagtgctctggctgctttttcctttaaaaatatccttaggcgcccgatcacattataaagcactgacctgaaaaaattcctcttaaagcacagagtcgtatgtacagagatatatcttaagtcagtcattgtcctccccttgaaacatttgaatatcttctaagagaacaagcagtatttagggacatggctcagaactgagtgatagtctggatagttgacccaagcgagcatgctaagaaattaggttattttctcaaagtttccatttcttcaccttgtctctaggctttattcgtcttgatgtgtttggttcttttgcatgactctttctgcagacatggtcattactggcagagttaggcacatttccttagttggttcaagttctcaagtccattaccatgtctactgactgactgttctacttatgtctgtaatggttatataccagaatgctgatgggatttctttctttagaggaatattaagaggggcagtaatcccattaatcttattttcttgaaaaaattaaactatataggctttttgagagaaatctatattactgcttcagacctctggaaagcagctgggaactgttactatcacacataattctcaatatactgcactgaagttgattatattttggaggctttttttcaactctgaatttatttttaagatttatttatttattttatgtatgtgagtacactgtcactgtcttcagacaccagaagagggcatcagatctcattacagatggttatgagccaccatgtggttgctgggaattgaactcaggacctctcgaagagcagtcagtgcttttaacctctgagccatctctccagcccctcaactctgatttcttaaactgtggtacatatttgattataaatacaatgttttatcaaaatgcttagagatattaattactagtttgaaacagacagttataattgaattcttagtagtgtcttcagttcaagaggatagattaagttgagatatacgtgtttgaaactcatttccctttattggtagagacagcattatgttgttgacactgtggataagatgtgttaagcttcacgcctctgtatccctttgtgtacataacttaagaactttctggaatatctaggtggaagaggctttctttttctatttgtcaatttgtatcatttttaaaagttttgaaaaattaatttttttgtcttctaataaatatgcactcattgattcattcagttattctttcaacattttcttttggtttaggtattgatataagtactgagaactcaaaataactagggtatactttgtgctctcaagtactcatagttcagtacgagatacaaaaacaagcatgaaacaatgctgctatgtgcacaccatctatacagagatactccttgtgtggagagctcctgtaatcctgggagagtgcatagaaagcactgtgttatccatcagaaaggatgagctgagtttgctacagatggagttaacacttgccttccaccctaacatgccacataaaacacagaaaggtttgacacataaaaagaggcgttgagagaagtttaaatccatctgtggacgttggtctatgggggtcttggttttgcatgctttctgtctttatctatctatctatctatctatctatctatctatctatctatctatctatccacttttgtacagtcagtattttatatagtcagtgcttctaagcaacagactttctacatgaagctgtaactttgctttagtatggtttagaataacttctagactgctgaaagtaaaaagtaacttcttttaatttcctcccatataaagatagcacatgatcttattttactaagctgttacattgctgctatcacacagattgtgtagttaagaaggcagtggcttagaagttgtcaccaagtcttttcagctccatcttgttaggtatggtaactctgagggagtgctggagtagtatggttggaatgtgcctaattctccatgggttcgtatggtgaaggcttggtccccagtttggtggtattgaggttggtgggacttttaagggatggggcatagtgggaggtaattagtctgatgggaattctgccctcaggaaagattggtttgtggagagagtaattacaaattaacatgggtgattataaagaataacactggtctctcactggctcttggcttttatcttgtcttgggttctcacccctgtcttgtttatacaatatggtgacatttgtcatgaggcctctaccaggtcactgacatcactctccacagatgctggtactgttctcttgaattttcaaagtgatgagctactgatttttataaaatacccagtcccaggcattttaatatagcaacagaaattggactatcatagatcattacagtaattactaattcccagtttctggtttttacacatacctgtatatgtacacatgcatatcatatatccattttgtgttttaggcaaattattaacttccaggaaagttttctatatttcctaccattcaccttaaagtagtttggaaactaaaatggagaattgtgttttaatcagcgttttatatagccagggttggctttaaactcagggtagccagtcaactgtgactttgaacttctgatcttcctgcctccttctcctgggggctggaatttgaggtgtgtgccaccaggatattgaagtgaatctctactgtggttatatgaatagcaactcttaagttagtctgtttttaactttcttatttatttcttaaaatacccagaggtcagcttcccaagggattccttttgctccacctctcctaacctgctttatttttattaagtggaaatcaaagatttttttatagattttgatagaaactttcacttataatttctctgagtttttctcatttcgtttgctgtttttttctttctttttttttttttttttagcattttatttttcttatagtgtatcttcaggaaaaattattcctgccagctcaacctccctttcccttttcttacttgttattggaaagaaattccacagtagctggaacattctgtttgactgttcaagacaaatggtggtgttctggtcttagagtttcaaagcctaaataggtttccactttgcctagagtttaatatctcgtaccatcacaggagactcaatctgtattcttcattcacatgtggttatttgaggagttatgtattttcctgcctgctcaaacacttcagggagcgtggtggtgtggtttgtgcttacacagccctgccctgtctagcaaaatggctactggccacaggtgatcattgttatttaaactgtgtttggtgtgactgagaatctggatctcaatatttatttgcttttaattaatttaattaatataaatgtgataatgcatacttagtaatttattagactaaaagtttaaatgtatttgggacaaattggctatgtgaatcatttttaaggcaaatttttggaaatcaaagtaaaataaaatatttctgatgaaaatttggcttctgatttgtagtatactacaaatgtaaagtagatattggattttgaagactcaatataaaagtagaatatatcagtgatatttttatattgtctatgtgatatggcagtaatattaagatattattttgaaatagaattaaataaaatatggatgtaattgtctctttattttttatctttttttcaaaaatgactatttgaaatttaaaatcatatgctgcatttctgctgaataatagtttttagatttggctggctctcagagctatcttttatgaaagtattatggcaatgctttatgaaaatataggcttcaaggtattctggatttacaaagtgaatccactaaatctaagcctactttatatagggttcttgaacactttaacctcccttctggtctaccaaccagaagtagggaaaaagaaggtttatacaaaagggggttatgaacctgtttagaagtagttctttgggggcaattcagctcttcgttgtccagatataagcagtccaatccaatagtatataccacacacaatcagtagcagcaatctagtccaatagcaaacaccaaactggaatcagtagcattggatctgtccagcagaaactgcaaggctcatctgaatcatcatgagtcagcagaagtagcacaaattattcagataccttgggaagttctttggtgcaagtctctttccaaagtcaagatgagcaaaaaccagggaagaccaacaaagtgttgcaaggcatagcaatgcaagagcatcctttcactgtctgtagggttctacttacactctttccaaacatcacatgccatctcaagcatctgcttcagtaaaacatcccctcacatggctatttcagcaaaacattctttcacaagacattttccagaaaaacatcatgtgacataactgagtttccaaagaaactagaaatttctacttcagtccctaaaagtgaggagttgagaaatttttctctctataggattctgtaggtgattctgaagcaacgctgagccccactgactgaggaccactggtctatattacattactgtcacagggctgtgcatactaagctactaagttcacatttgtttctacttaaagtttggagttagaagagacagcccagagctctctaattttgattcatttattgatatgtttacctatcatttgtctcaagaattttattcttacaataatatgaacatttcttcttatggcacagtggcacagggaccataagaaagttgttgtacattggaaatctgcttggtgtcagattccagacagttgaccattacatttctcccacagggatacccaacagtgtgagtctgtgagaaagacaggctcacattactggcatcatctgacatttaatggttaataggtgttgtaagctccaagttacatgatcatctttattgttatgttgaaaggccttaaccatactgtggagtagatgagggcctttaaagaaataattaagtttaatgagtctagaatatgtcttcaatctattatgattttggggaatgggggagagagaagagatgtttacattggaatgacacagtaaagaggagactattgaaatagttttcataagaaaagaaatcttgacctagaacacctggcctccaagacagtaggcatttctgttttttaaactatcaagcatgtggttattttgtcatagctgcccaggccagcttgccataggtcatgtgacaaattggttgtagaattgtactgtctgcctattcagaatgacttcaaagcccacactctgaagacgtttccttcctttcggatagtgctagatggtttttatctaggtctggaagacactgatgtggatttgaaccattgggacataagtcaagacatacatattttaccttttcttgagtataagccctatgagatctggcctctggtggattttgcatactgttgcatactcttgctcctcctcaccagcaatgatgttttttcagggtgaaataggggtatgctgagtgaatatctattggatgggctgaataaacagaaaacgagaggcaactgatggcagataggtggtgcctcagaccccactctgaggaatatccacattcgggtcatggtatcccaggtttgcattgacaaacacagcgactgggagcctaagtactgcttacagggaagccagcaggcatagaaatttgtaaaaattagttatgcgatgctactggtgattcagaaaggagagcaaagcagtaggaagcccctagaatcagggagaccggcctggaggctgagcagagactgagcagggagaccggcctggaggccgagcagagacgttagcttggctgtcggaggggaaaggacacttgaggcgttgcagggagagcaacgcagagagcactgaggagcagatgactgacaggagagatgaaaagagttaaaggcaagtcaggagcgctttgcctaggccatgctaggcccgcagaggccgagttacttgttcaaagccacatgcttctcatctgaggagtcttttattatttgtttccatattgagcgtctgttctttcagaagcttagaatcttgtgctgggatttggtttacacgtctggactgataaattttgactgtcagttcagccaaaggaatattactactcatacttgacaacttctaaaaaatgtaattaaaaatgaaactggagacagcacataaaacaacatgtttctaaagctgacatattttggtccccaaagctattttgaatttgagcgttagaaatgaatctttaaactttcacgagtgaggttgggtacaaagagaggcttttcccagtctgaagaatgaattttaaaatctgctgtagaaaaataccacagagaaaaatatagcaagcagctggccctcttacccatttccaagcaggagaggaatttcagtcgagcagaaaaacagctttctttcataaaagaaaacacagcaagaaaaataatcctcactgtgtagccctgcgcagttattttctgtcgagtattagacagaacccgagggcttagcattgttttgatactcttgcaactggcagatcgcctgctggaggaagttggaaacggactgaccggctccaggcttccaggtggctgtggtaccacagctctgtgctgttgttgtcagtcatttaattccctcctgaatattgaatggtgtttttagttcacggcccatttagggtgtctttctgtttcctttttcttttttttttcttttatccgttagccacattaagaagaaaaagttaaaaaaaaatttaaaaaaaaaaggccacccaggaagctcttttgcaaatgtgagtttaacagcaaagagcacaatcaagaaataacacagcaaatagtaagacactgacttaaccttatggaaagttgacaagtacccatgacatgaggactttccaatcagactagccagacaaatcaggagaaagcctcattaatatgccattctaagaaagggactagggaagcagtgttattttaaagcttttctttaaaaaaattaaaagataattatattatgtgtgtaaatccttagtttgcatgtctggtgactttgaaggtcagaaaagggtgttaggtccctgggagctggagttatggccaattgtgagcagccatggcagccatgttagtgcttgaaactgaacccaggtcatctgcaagaacaagtgttcttaagtgctgagccatctctatagcccggggggctttgcttggtgtgccttttagtatccttgaagaaaatggcagaatcaactgtatgtttatctagagatcatgtagtagccttctatatgtgacctcttcatagtagcatcaaatactgcatccaacatcaaaggaggaagaaaagaccggaggacagggaaccgacttacacaaagcccatggaggaatcctcctgcgtttgtagcactagctcgtttttctctttggggggaacatctgcaaactgtaattaagcagttttcatttgtttctcagcttctttcatcgtcactaaatcactacacttagggaacaaattgacaaattatgaaacacagaaactgctggttcagttgcagaaggaaatttcccttctcaaattatgacagatttcaagctgatggagccattttgttttaggtatattagcataaatcttcagtggatgcctttataattcatagtcacttcaaatgggaatatttggtccatagataatcattagggttttttttttttaatgtgtgtgtcttcttcaatttagatgtaattgggtacagaaagaaaatatttaagtgtgtatagcaatttgaattatgatcattaaatttattttcagcagtgttcttaatgcataccattttgttacaatgatgttgctccttggtatgatccttagagaattaagaggaattttttaaaaacagaacattgttttggttataattaaaagaatgttttcttctattgtatgtagtttcaattttataataatatgtataatgttttatgtatgggtataaattaaagaattgaataagcatatgggattttaaacttttacaaaatatagaaaattactaatagtgagctaaattaatttgacctttagctgatttacacaatattaaataggggcatggttgtttggtatttatttctttgaagggaggtgttatttttacttcttgttggcaagtgtgctgttacctaagggaacaggtaagctgctccacgagaagctgaggtttcctaagactgtgtgtgttgattcagttgaataagcatgtattcaaatcagaatggttttggcagtgttcgttcagccatgaaacaataatattttctttgaaatggttggctaagcccaaagggatacagacaggaaactttgctttaaccatccttgtgtcttccgtatatgaaaaccacagctctctagtatgtgatttttttgtgtcttttttttttcttcctagtttgatttgttctagtgaggcggatttaggtgatggcagccagcttgcttgtttgcagcccactgctcccttagcgtagggaggaatccttagcctgttcgtttcatgtgcttttctggacttaatctgactttcgaattaggttttgtggtcttagaagccactgatagacaagaaggactgcaagctgtcatctaagtctggcctctgggtttagtcttcaattatagtgccagttccgttcttggtaatgttggcagcatttcagcatcatgggctattctacttggtaggacggcatgtgaaagcattcttttgatagctgtgctgtacgcattaagctagaatccagggatgcagaaatgagactgcactagaagagctcatcaattgccatgttgctatttattgctgtctgcttatgaaagatgctatgactctccgaggcttttgatgaatgagggtagctgtccatgtttgtcacttatagactgtgcagttagtgctcactggtgaggccgtattaactactctttgcacagcgctgacagagttagattcagaatattggttttgattctggggccttagattttgattgagtgaatctttatggattaagaaaaaaaaaagcaagctgggtgtagcatgcaaccctttaatcccagcactgggagggaaaggcacatagatctctaagtctgagggcagcctggtctacaaggtgagttccagggcagccagggctacagagtgagaccctgtcttgaaccctgttccacaccctccccctgaccccccaaaaagagagaaaaacagtaagaatgactagaacagcgcagacttttcctcctttactgtaagcttttttttaaatgacgtgtattctaaagtgtcctgtaaaaatgaatttgcaacactcacataatttaaaagcaaagacgccatctttgaatgttagattattataaatatatgcagacgatggtctatgaaagacttatctgtgaagaagaagagaaagctaatccccagagtgccctccaatttaaatgagttgaacaaaatgtactttggtgcaagacaggcatgatctcagggtgtgaagatgtttcatgcagaacaaatagagctggccttctgtttcttttggttgtaggtagggccagtgtgataggaagagcactattccatctccgcattagaagacctaagaactagtccacgcatttcattttctaagaccacaaccctggcatttactctttaaactcacacaacaggattaattctgcttgtttagtgtggcttatccacatggggttaaaagaacaacatcaaagttaaatgttaaaccttggatgtgctgtatcagtcagtttcaactccacttcttgaggtagttaaaaccaactatgtacaggaaatattgtatatggtgtatggtatagggtacagctataaaagtcagccaatggtcctatgctggcctctggtggatggactaaatactagtgttcacataaccataaaattctacctcagaaaaccttgacatgggaattctatcttatatttccacaaaaatttcctgggaggttcttattaaaatgcatatttcaggattctttctttaaattctgattgactagtatcattgtgcaacctaggaaccttgactttcagaatagctttaaaagtatgccttaaatgaattggaggtgtgtatatgtgtgtatgtcttcatgattgtgtgtatattcatgtgtatatatgtctgtgtaaggaaatgggtaaagggaaatacatggatgttttaaaaaatgtgcaaattggtacaaattgaattttataagagtaaatttatagctttcataaagttttgacatactaaaacaaggaaacaataatttgttttgctatatatatatatatctttgtttaatgttatcattttatattatcttaaagactggaagaacgtagtgaattatgggaatagctttgctgtgaccctggtgatctctgataaagagactaagatagaacagcctacagagcttagagtggcctttggtttggttacacatacattctgtctcaagtcttagtgcccctgtccatgacccaaactactgtaccacaggaaaatgtccttgcccggagaactgtgttctttgtgggcattttaccattacaggcttttaagggataatcataaaataaagagacatataataagataaaacaaaaactaacacatcagatttgggtaaaatgaacaaacaagcaaacagacagatggaaaagagaccaagagaagacacaagaatcagagacccactgttcacactctgagcttcacttttattaacactgaaatatatgtagtaatttctattgaatagctgtatcagtattaaatattacacacatatactatacatatatgtttatttatacttatgatgcccaaattataaaggcacaacttactgttttccttcatttatatatttgaaaattttattgtaataattttataaaactgatatcatattatccataatctctttgaacttgctttttaaaatagaatgttatgaatatctttccttggaaattaatattattatttaacagtgttggatggctgcacagtattcagttgtgtaactatactgtaatttgttttactattgtcattttgctaagtgttgttcatataagtgaacaaaaattataaaaattaatgcctacagaaaattgcgttctagaatggagaaatagatcctaaacaatgaatataataccatctattcaaagatgggaactttgggcagtgggaacagagagggagcagtggctcaggagggagcatgttgaaattctttattaatgagggctggcagccatggaagatgagattggaaagagattagaaagagcaaggggttaatctggacattacaaaaatgtccaggggagccagtgcagaggccgcataaagctgatattggcctgctttaggcaccgtgaaaaggccaagggcggctctgtgacaagaacaagagtgagaggagtggaggttaaggtcagaaggcaagtaaggaggggcgggtcatcataggactgtaggacttcgtcacgatttagcctcggctgccctcctctcctctcctctcctccacccccctccgcccccccccccctctccccctccctcccccctccccttttccctccacgtcgtagcccataacgtatttctcctcctcttcccccccgcatacccacttccttgaccccccccatcccccccgattcccccccccccccaaccctccaccacctcccctgtcccccccccccacacccccccccccccctccctaccgccccccacctccctgttccactactcctccctctctcccccctgtcctccctccccacccccccccccccttctcccctccctctttcccccccccaacctccccctcccactttccccattccccgtcctccccccacctccccctcctccacccctctccacgcccccatctgcccgggctacatccttccccgctccttccccgcaccccccatcgccccacccccactttcacccgtcgtcacatagtacccaccacgctccctgcccgccgctccaccccacccaccaccccacccccccctccgggccgtccctctcgctacccccatccccccctcctctcgacatctccccgccccgccactctcctcccaatcaataccgcgcgttctcgtattcccaccactctgtcctgtcctgtcctcacttccggtgccacgtccaccactcgtcccttctccgtccgtgctccgcgtcccacccacctgtcgtcccgctctccaccacgcgcgtcgacatcgtcactgnnnnnnnnnnnnnnnnnnnntttttttttaaaaaaattctaggtgatatgctagttgagagataaataaaatgctctgccctcacaaaggctgtgtcttacaactttcctaaccttccatacccctctagcccagcgaagtaataaacacgtggagggtagccagcagaacttgctggtttaagagttgattatcagtctgtttcctagctctgtgtcatatcttaccttcctggagccatgaaagtgagctccccgctctgcatagacatacatatgaattagaagacagaaaattagggccgtgtgatggagtgtccaattgtacagctgtggtgatagtatgaagtatgactggggagtcgcagcctcagggaacagtgcatctctgccctcatctgatttggaaagcagcagccaagactgtagttttctgttggtgtggtttctttacgtttcaccacaccacaaggaactgggttagtgttgctggtccacaccatgaatgcagtgttgtaatcaagggattacaagatgggaaatactccgaatgcccatcatcaggtgaaaggagaaacagacacagtcaaaggtttttgacaataaaagaagagaaatattagtgtatagcatgacatcgctgcatctcattgttataataaataaaataaatcacgtggacatggctttactataatggaatgtctaataataataataatgtataataataataataataataataattaatgtccagttagcaataaaagttagattaactcctgcctgttgttggggttgggagtggggaggagtctgaagattggctctaagcacctttttggggcgatgaaaactaaaagttccatgccgttcgattgttacataactacacactcactagtaatcattggatcctgtgctaaagtgaatggatctgatggtgcataagttacccctggataaacctgtggagagggacagatgtctctcatggagttctttaccatatgaccccatggctttagctcaagaaccagaagagtctagcttatgtgtgaaactttctgtgccaagggaataaactacacattgacttactagtttcatgaagctaaggacagtgcccaaatgaaccttaatactttgtatgctaatctgaaggattaatatgaatggattttgtgcataacaaatgaacttctctgatgccatggagtctaccctgcattgacattgtcaccagtagcttttactctaatggagatcaaagctacaggaagaaacattcaaataatgttgtatctgcttgcatggtgggccacttcattctgtgttcctgactcagtcagtggggaagatcagctcagcacagcttgttgggtaggcatgcgtggcctctgcaccaaattctagttcacctgacaggttacaagcataccgtgttatctatatcctccataacagagaaagttactaaggaatgccaatttgattgtaaaagactgaagatggcagtgggaagataaggaacatagtctgtgatatctagagggagggaccgtaactcataggagatagtgtcttctctcttgttttcacaagaactcatttcaaaggctgttttttctttcttgaatctctgtggttctttctaccacctctgtagctgtgtcttccattcctcgtcacctgaattacacattagacactacagtgcgcacctcacttgtctggtggctttcctatgccctagcctgtctgcactagtcagtgtctcggctgtactgggggtcaactcccacggtcaagcgcatagttctattcaagttctccacatctaccctgttccatgccacaggatgtgtgtgcttgttttcctggaagattcactattgtgccttaggccctggccttctggtcctggaagtttcactcatgagcttaccctgccctccatccctcatggaataataagctcttcgaagttgtagctagcctgctggacttgtcagcttctttaaagcctatcttgcacgactcattcctactgaagcttttcatgattccaaaaaccaattactattttgccactttctgactttgagcctctcctgtgtggtttgtcacggatgccttctctttgggtgtttgcacacatgtctttacctcctagcttggatactctgtaaggggagggggtactgtgcctccgttgtctttctcatcttgagggcacatagtcgatgcctggaatatcgcttttggactctctaagcgtcagggccctactaattgcaggtttccttcctgaacgtaactaacaaaacgttagcaactttacactctctctaagtgctttacactggacatttcaaaattttcatcttattgccaatgtgtccctcatctagggcttttgacatgtattttttttccaggccaggcttgtgcatttgtgccttggcaggttgatagctacgactgtgaataatgagtcaattatcatccagcctcagggaaagcacaattattcctgcctggccaggctgaggtaatcctcccctcccggtgccctttcagatggagaacataaaacagttggaattcagagcactgcaaagggaatttagacaaaacacgggtgtgctgaatttagcttccttggatttattctgatttatgattgattggtttttaaattgcttatttaatcctaacgactatggctccaggggaggccggctatggagggaagcaagtgaacaagaagcagtggcctggagtagtttggatggacagattaggggaagatattattgttcccaggaccattgctgtgtaatgggaaaatcaccccagactctgagcgaggacccagccttgttacaagcatgattgcttatcccctgttctctttgcagagggctgtttgtggctgcctagtgtggcacagaacattccccactgcggtttttcttcccttccagcgatgtagtcagtatctcattgtgactgagaacatgctcttgatttatattgctcttgaccacactgcagaagaatggatacttcgaggtggctggcaggacttgctcttagattctgacactggctgtgctgttgtgtggagtgtttctcagtacacagatatggctctgacttttgtatagaagaatttgaattttttataaaagttttccctcaaaattgagctctccccaaataatcacttttacctcgaaggtgtataatcaacatgtactttaccctgtaaagtgtaatttaccttgtcacccaaacttccagctttttcagggagtgtgacctttccctttcatctgaaattagacattgatggtgtggagatggccctgtaagcctgacctattggaagcttgtctgtttggtatcaaaaggaaattgaaatttcgtcgcttcagaataatgaaacctctggaaacctttagaaaaaaactttctcatctttattgaagtttgactcaaaaatgcccaaagaaatgctctttctggtctctgtaatccgtgtgttcgcggaaacactgctgttagatttccatgccgaactacgcctgatgtgcatttcaaagcaaggagcattagggataagataaaagggtagaaaaggactctgatgaaaaacagaagcttagagatgaacagttgggtggcacgtgtgcgttgccaccaggctcactctgggaaggaagcagcatctggtctctaatcaggctgctggccacttccaagtcagggctgtgccagcatctgccattttgacattatcatattgaaaaggaactttgttctcatctcgttctgccaagagatttattacttactaggtttaaaaacccataacaggcccgtatacaaaagcacttttttgggtctttgcagggacatggtgttacagtcttataaagttaatttcagggtttaggaagcattttcaactttaagtttaatcaaggagagagcaagttctttcctatgtctcttggtgctttcaagattaacagcctcacgtttacgagaggggatgtttttgttgggtatgggactaagtagatcagtaattcagtaacagcaccaggaatttggacttcactttttgtcagaggagattcatgtggtgactgtcaggtcccctggcgttgtattgggaactgggagaggagagcatggagtgacctgagcacacacatgacctgtcccttcagaacgtctccttgctgagaccactgtgcttttcaagtattgaagtcagttgactagaacgggaatggtgggttgagtatgtaagattttcttggtaagtaccaaatgtagttttgtttaacttaaaagatacccaggaggactgaaactgctccttcttttattgcaataatttgtgtaacaacaacaaaaaatctgtgctgaggaatggtgggagccacagaagagccttctcttctgcctgtgatgaagctcgggggcatctgttcatccctcagtagcttgtcctgtttctaagcatctccacatcacttgactaccattacttactgttacctccagaaccatgagaaacctgactcgaacaccgagaggtctgggagactaagccttaagtgctttcatcctcacttgtctgactcttcatattgtttgttatcccagcagtggtttcagcaactctcctagcacattacccacttcagttcttctacctctggcatccagggctcgcacttctcaacagagatttcattcagaatttgttggcacaaaaggcagaggtcatctttccagtggtggctacttagaggagttgctagtgctggtgtagtagacagtaatggagagctggtttcaaagaagatggatatgtgctttttttcatttttttaagagaaaatgagtctttaaatgtgaattattattacagtctatgttactttaagtttgttctataacagtatttcattgtttgaaaaaaaggggtgggggctgagagatggcttagaggacccatgttcaattatcagcacccatatggtggctctaaattatcagtagcttgagtctcatggcatctgatgcctttttctgacctcaggcactaggcatttatgtaaagatgtacaaacatgtacttagtcaaagcaccctacacataacaccctgacacataaacaaaattttagtgttaattcttgacaacacccctacaaatcttaattttacttttaacagtgtattcagaatcaaacatgggcagaaaaggagtatagtgaggaaatactgggccaaacaagactgaacgccagcagaacaaactccaaattatacaattccatgtccgatgttaaagggtttcctagagagctcttcacccagctttgctgactgccacacacttctctccccgccccccccccccccgccccatctccttttagcaggtttctttggcatggctagagtagtaccaacatctttgggtctccaagcaatccatctagatttcaccttcacagcttcatgcagtgtcctctctgggtcttcaggcaggtttttaggaaaaggagaaaagctaccacatttaaaaaaaaaaaaaaaaccaaaatatcatgagaatagtttctaggtcagctgataatgttcttttccccctgagtccccacagtttatattaccattatagcaccactatcttcatgctactaattggggggcttgcttatagtttcagagggctagactcttaccatggtaggaagtgaaagatcctgacagaatataaaaggtcacagaagccctgaaattggcaaaatatatttcattgttagcagaactagcttcactgatttagaaaaacagaggtgcacaatgctctggtcactccttaaacccgtgtctgccagtgttttgaccgttccttgaacccatgtgtgtgcccaccgatgaagcccattgccaggtgtttgtgatattggttgctggggaagagtcggaaaatctccccagcaaccatagccgggccaatcctgagttgctacacctgcaccagactctttccttgtacccctcccatacccatttcttgagaatagatattgtttagatctggaaattccctactcccctcttctccttccccccttgagggcctataaaaactggggcccctttcccctcacggtcaactcctctacccctgagtgggatatgagttgtccccagagctctggctttccccgaataaagcctcatgtggtttgcatcaagcttggtctcttgtgagttctttggtcctgaggcctgagcgaggggctcctctcagagtctttcagaagcagacaggcatggtgctgagagatttacattttgatccacaggcagcagtcagagagggaaattcagtctagtatgggcttttgaaacttcaaagcccacccccagtgacatacagtctccaacaaagtcacacctatgctaacaaggccatctcctctaatccttccaaaatagttccaaaacatcatgactaagtatttaaatatttgagcctatggaggtcatctcattgaaacctatctcctaagggttccaactggacccttatcagactgtgagcatgaaagcatgaactgcagattttggtgtcagggaagtgatgtttcaaaggaagtaagtatggtggctctgctgtgctaggcttctagagacctatctccagatcacagataaaataaatccctgggacattttcatcatagtctagttagggcatggcatagaattccccaaccagggatggcttgatatcgaccacatgactgatttataatcctttatcacttcttaaatatatgtgattgacacagtgaattagtttatttatttatttattttaaatataggtatcctgaagccttgactcttctttgactgtagaaagcttttatttattttttaaattttctttcccttttccttatcatatttctttcctattttgccctgcaagaacttttcctcttgttttactcaaagcagtagttgggctaagttttagcttcagaagggcctgggttcaaatcccagtgtttacctcccagctacattacctgggacatatgatttaatcttgagtagtaatcctctgggaagattcatgagatgctcagaaaaggacactcaatactcagtgacttttagccattattaatttcaatattgctaattgtattaattgtctcattgcggtgtgtgacaaaatttcttgacagcaacttaaggaaagaagaaaggatttatttcgtctcagtctgagggcaaagcccatcatggcagggaaggtgtggtggtgagggtgtgaggtagcgtggctgctcacgttgtacccagtcaagaagcagagagacatgagtacttattctctgtgtgctttctcctttttatttgatcaagacccagcccatggggtgtggcttcctgagttcagggtgagtgttcccacctcatcagacctaaccttgataattcctcacaggtgtgcattgtgcttgtctctcagcaatcctagatcctgtcaagttgacagtcaatattaaccatcataatgctaatattaatggttttttttttttggcttaacccattgcctcaatgtagatgacagatagtcacctcaactgtgatgtaccttccacatttcagcctacatttggagccctgtttgcaccatttccttaaatgcaacagttacttcaaatgcaacatccaagatctagatttattatttcttacccaactgactctattttcttctgccaatttctgttcatggtatcatagattgttagtctcttaattttgaattaatcttaggttcttttcttattttaaggaaaaacaatagctgtgcatagatttaatacagaggtattacatatatgcaatatacatacatacatacatatgctaattagtatatatatatttttttttccgagtcaggctttatctgtgtagccctggctgtcctggaactcatctgtagtccatgctggtctcgaactcacagagatctgcctgcctctgccttctgagtgctggaattaaaggcgtgcaccaccaccaccacccagtgaaaggtattgcttataattgtaaatagttaagaatgagcattgactaagtagtctctcttacatttatataattgttttctctaactaataaaattcatgtagaaaaatattcaaaaacataaaatgttgacaaattaaatttataatttatgtattcttttttgaattttagaagtgcatggatatgtaaaaaatgcacagataagcaatcagagaattttatgtggttattctgttatgtaggattctgtgtaggctacttttcctatttgctcttttccttatactgtttgaaaaagtaggcatacattgcttccatatgaggaaaaaaactccaaacttaacagaaaatgagataaatagtgtctgaaattcttgagagaattatactttcttgaacttttaaacaatgataaaaatagtactgggtatatagtagacaatattcattgagtgtcgaagttgtgttatctttctatgcaattttagaataattttaatatatttaagaggacctaaaggcttcaaaaaactttatttacatagttctttgaaaagtattctttttttgggggggggagtggttaaaaagaaatttttttggtaaacacgaaagaaatcaacttgatcacatagggtatttttaataactcataactatcatttcagaggataatgtggccaaatggggagcacatggaactgattcatcagaaaatatattttctactgtaaaatggaatcataaaactgaatcaaatggtcgtcattttagaaatacatccatctttcttcacacttcatcggaacactcagaagaggaccaggtaattctcttacatttatagaaacagcttggagaagaagaaagcattcttcttagaattgcaacagcactctgttgagaattaaatcattatgtgccagtgtttggttatccttaatttttggtaaaacttcttagggacttgctatgtgtaaatgcttcatgaaattatatattttgcttttaataagagttcccttttccacttctttgtataaaatggacttacttttacctgtcctaagtttatcatgtttagacataaagtagaagctgctattttgctttttctaagatttggttcctagatattagatgctatcctctaaatgtcaagacttcattgacactattcatctattcctctttggcaattgtgtttaattatcatggagtgataattcattgtgtttacttttttaagctatttgaattttaattagttttctcaagtcatttgagtttctatttcttttttggaatgttttccatgtgatactatatacagaattacaagagattttgattttacaaggggtcacaagtctctgtgatagaaatgaatttgtatagaacacttttgtatataaccccttgctgctgctgatgactgtgagctatgaattgttttccataaaggattcacactctactggtgatggttgagatatagtaaatatgaagagtcctagaaccgttaaattgccccatcctcttgtaccttggaaacactgtagcagccgccgcctctgatttgtgcatcagaggtttagtgggagatggcctaggaggtggagtagctccctgttttatgcacaggcaggcgtggttgggttagctaatctgctagatggtagatgagactaggttaccagaattgcagttagacttgttggaaccttctccctcaccactgctgttgcttagagtctggcctttcataaatagctaggaatataaccattcattcttgtctgtgtgttcttactgttttcagattgtgattgatgaaggccacaaagttgggagttcctttcaaggtgatatgacccgggctggaaaggtgaaggtaaggcctgattcagttacctaccttgggaagaatacacagcaaacaaatgaactgtattagcaacttttctgtttctgtgatgagtcaccatgaccacagcaattttgaagaaaagagtgtatttgggcttatggttccagaaggataaaagccttacatggtggggaggcataataaccagcagcaggcagcaggaagccaggaacgcaaatcctcatccacaagcaggaagcaatgagagtgcatgagagtaaggcagggccttttactcataaagcatacatccagtgacaaacttcttccagcaaggccttgcctcctaaacctctccaaacagcattactgactaggtaccaaatattcaattactagagcctataagagaaacctcttaccaagctaccatataagccagtacacacacactagattcttgctttcctttgtacaaaactggatgagtgaacagattttatccttgaaaggatttttttttttaagttggtgttggaatatctaaactgtttgtgcttggctggatgcttgatcttttttccctaaggtttaacagatgggaaggactttctagcctaatcattaagaaaaaagatgctataatgtaactgattctcaaattttaatattgaaactgtcagatgaattttgctgttgggtatgtatgtcaagttaaagttgcagttacttgcttagaaacatggaagctacctattgaactttctatggggtcagtgtggtctgcctactacatattcggctcaggacaggaagatacagcagttaaggaatctcagtttataattttaaggtacatgctaagcctatggtcaggttgtgagcataaaatggatggtgaccttgtgcctttactacattccatgtgccagcattttcttatttatactcttcgatagtcctctgagatgcatttgtttgtaaatctgaaatgcctcattgtcagtgtgcattggtattctatgtggaatagttcttcattgaaatgctgcgattgggtctaggaaggtcatttgctgttctttttaccattgaagtaattctcagatgtacttgcctgaaagagagcgaacacttgatgttttgccctccttacctctcctgtgatttacctgggcaggatgattttgttccgagtgaacttttctttcctgcttgctttagttttctctctctggctctccagagtgctgtaagaaagcatactatgaggaaggatggtagcccagcaccaccaccagcaccaaaccaggaacctgttgtctctgatagtaatgttaaaaatcatggggagaaaatttgttaatctcaaatgcctcattgtcagtgtgcaatgggaagtgctattctatgagaaatagtcccttacaagaaacctctcagcctgtgcgtgtctcccttcactgtagaaaacagactacagtgttgtaaagccctggacttgcaattgtcttgctttcttcagtagaaaagcttgtggacagcagctttaacagggccttgagagttcacaggaaagcatatccagccttcaacagagtgctgtgtgtgtgtgaatccatgactgcattgtctttctgcatgtctaatatatgcaagataatttcaatcttcttgtaggtagacaacttcctagacttagaagatgtggacatggaggaagagagtaagccccagatgaacaagggtatgtgctctccttcttttccatacagtgtggcctctttttagaaacgacaagtgatttatgttggtttgctatttttagcaatccttacctctcctgatgtgacaaaaactgaggttgtgaaatttctctttgaaaagcaaaaacttttacacaattggtcaaagccttttgaaacctttggtttaagtgaaatagagctgtccttttgctttcccccaaattcagataaattaaactattaaataatagtgtcacatacagctattataaagtcattgccttatatttcagaactgtcttacaaattgatatggttttaaaggaaaacgtaaaacagcagttgaccataaaatcataaaaataaaaatattggtcacacaatgaacaataatattcagaattttgcctttaaaatttatgaaatatttaaatgagcacatatttttttttctgagttcttttctcataatctactgaaagaggctgtatgctaatccattgatgttcatgtagaagattgctttctttcctggttaatatttttgtataagaacatgtatatttcttcatggaacctttggagtttgagctggagagatatagctcaactgatagagtgtttgctcagtgtcctcatcccaacattaaaactgggtgtggtagcccatggggtaacatcagcacatgaggaccagaagttcctgtcatccttcagtacaaaggcagtttaagtctagcctgggactcatgagaacctgtctccaaaagaagcaggcaaacaataacagtagggacaacagaaaatgctgactctctagtggatgtgaaaggacatcttgaagttgatcttctcctgctgctacacagtttagtcgtaacctaagttattgctgttgttgagagaagaggtttccttggaaccagatagacattacagtggctttggagagttgatctgggttagcaacagcttctcacttggtggtgtagggccctgcccagctttctgggctccttgaattaataaggctttgggaatttaaagcaatgaaaatatttcttctgctctccaatgtcttactgctccattggagatgtttttcaagtacccattagccagaagactggaagactttgaaattactcatttcagcgagatcagagatggaaggaaattgcgtccttcagggagtgttggctgacttcataccccagtcactcttgagtttttgtaagacctgcttaagagagagccaaggctggtaaagcacccatttttgattgattttgagagtaaaacttgttttaaaaatgcagattcctatatcctgcacctacaagaaaactgaattcattagtcctttggtggcatcctgtgaactgaatttagccatcctaattctgctattgtgtgaggttgatacattgaaactgttggttcttgtctgtatattaaacattgacaaaatcagcttcatagtcgagcaggagagtgctgtgttgggcactgttgtgatggagtttcttcatcactagcagtaggtctgtacttgccatatggcctgctgttctgctcgtcccaatggaaactgtggatagctgaggagaacctctctgaggggtggtatttggcagtttttatatcccttagcatttgatagcagtgagctgtagccacagacaggagggagcacctgcatggagcagcctccagagttgtacatctttggctggctctgatgagtgggcccctttgctttacttgttggttcagctattcttgaataggtctaggggaccagaatccttagctttataagtgtaggctcagggagctggcactcctccacccctggcagggccagtgttgtacctgcagagcctgtggtgtctgagagccttggctccaggcttgaagcgtttctagagctcttcccgtgaaactgacaaaatgttgctggagagtgaaagttcttcaggagctgcagtgatcacctgggctcactgtgtggttagtgtgtgtttttctcaaggtgtctgtggtattcagaacagctagtacatgcatcagagaaatccaggtggccgtttacaagtcaaatgctgaaggctgccagtgcaacatgggataacagctgtgaattagggagtcacatcgtcctgtccccaacatctctgcttatttgcagggaaatgatcagcattgcttacaacaagaacctaaacaggtatcactaatgctaatagtgacttataagcctctaacaccatgtacaagtggtgaacaccaggcaaggttatcagaaagaagtggctccccttcatctgtctcacactgatataaaccaatgtggctagcaaagtttgtaaaagtccccttataccctcccccaccctgctctccaatccacccactctcacttcctggccctggtatttccctgtatttcggcatataatctttgcaagaccaagtgcctcccctcccaatgatggccaattaggccatcttctgctacatatgcagctagagacacgagctcaggggaatcaacgtaaaacatcaacgttttctattgtttgtgacatagctttcttttaatattttttataaagtgtgcttttcagttaccagctttacttccttctttaaaaagttgaataaaagatctcactagtttcatgtttccagaaactcgatagcagaaggtgttgcatttggggataaacagttattgaggctgaaccaagtctcagtggacttgaatgaagtagttaagactgtctcctgtgtgaaatgatgtgtgaattgatggttgacaattgattcagttctaatcaccaaaaagaccaccagggtttcccaattttcataatgtacaatctgggtcacttgaaaagaagaaagaaattaaatactctgtgccaaggtgaatttcagtgtgtggcctaatttgtattgcacttcaggaatgtgagcagaaggcaaatgtttatatcagatggggaatgtgacatttttaaatgggcaagttgctcatataattttggcagctgggaagtttactgattagattctgttgttattgttcaagcaacagatttgcctgaggcaacaaggaagcatgttctgtattgtttgtttgtttttctaccattgattttatttattcactgtatccatgatcatagatattctccaagattcaagaacacagttctttttcagtatttgccttatcattttgacagccaaggagtagcgctttggagtcaggtttctgacagagctcacacaatgcagtcatatgagtggcctcagagtaatgcttcctgtgaggtttggtaccctgcattcattagttagctagcaccttttcctcttttgaattcgggatagggtagttaacctggtgattgccctgcctcagacaagatggctcaaattactatacaacaaaattatgatttgggatggctgcagtcattacatggaggtcattagggtaggaagacttttatttatttatttatttaaatatttattgtctctcagtttcagtgtggctggctggagagactggtttttggaggtccagttctcataatcatcctcagacaggtcccttacagtgggtgaatttacactgtagttcattgtgttggatgacgatgggcaccgactcctgcttaacacttgcagccatatttgatgtttaagttaaaaaaactttcttttattgagattataatataattgcatcatttctcctttctatttcctccgtccacatcctcccatatactcttccttgctttctttaaaattcaaggccttctttttcattaattgctgttatttaaatatatgtgtatgtacatgtatatatttctcaacacataagtacaacttgttcagtctgttatactatgtacatgtgtgttttcagggctgaccctttggtatttgatagccagttcttcctgccctctgcactctttgagttgcctaaggttatttgtataggtaggatcaaggcctcgtggtctctcccgcatccactttagcacacctactgttgttcttgttcagtttacacttaggaagtgtaatagcttttcctggttgtcaacttaactatatctggaatgagctacaatccagcattaaaggggcaccaggaagtaaaatggagctgaatcctgtgttcaaggatatttctttgaaacgaaggagtaaagatcttggggcaagattccacccagctaaatttagacccaggtgtggtagtacaagcctttaatcctaggaggcaattacaagcagatctcttagttcaaggccagcctagaactgagcaagttctaggtgaagagaaacttaaatccaggtgtggtagtacacacctttaatcccaagagataggcatgcagatctcttagttcaaggtcaatctacagagcaagatccaggtcagccaagtttagagcaggaaggagttggaaaacagaaaactagtgataatctaatagaaccagggggccatattccagcaagcagcagaacttgacagcttcggccatgtggtcctagctttagagtctagaatagaagggactactagggcaattgatgctggttagctggtagtgattaagagaccagcatcattgagatggaattttctgggaagtgttttttgagagcacaaggaaggttgtaccttgtgctgcagctgtacttggtaatgtgtaagaggcacaccggtggtacaggttttgaaggcaatggtcctctattcccattattctagtttttctatttgctaacttttccatctatgaagatgtaattggaaagccatgttaaccagaggaaaaaaacctactctccagtacttattattgcataaagaaatatttatattcttcctgagaagggagtaaaataggaaagctaattatttccttccttccttccttccttccttccttccttccttccttccttccttccttccttccttccttccttccttccttccttcctcctcctcctcctcctcctcctccttcttcttttttttaataatttatccaaggtaaggaagagttttcctaatcagatcagggaaaaaaaaaaactaggtatatgtggatcaacttcttggtttctgctgtggggttcatgctgttgggaattttgtgtcttgttttctgtgtgtgtgcagctctctcagagtagacataccttgaggctggagattcctattgaggggttttcactgtaagtacacatcacattcatttcctgcttccgagtattggtttagaattcactgtgcataaggaactgtgttggcctccaacagtatgcattcttgaattctttctttacctcagggaaaagatgacaacaatgtaaggtgctgaggtgtggagttattttgctttgaaacaacggttcccgtggcggtagaattgttataaacgaagtcatttttgttgttgttgaaagtcttgctttcgatgaaaacagaccagggctgtgaagcctcagtaaaggactcacatgcttgtcctgcgtgccacatcttttgttggacagaaccatagcataagcctggagagcagagttgattctcatttcacatcagaactaatgtttgccccagcagccaattggccagatagatgatgttcctcacattgagaggcatagccttgtctttattgcttgttggcaggtcttcagcagccttggacctatcctatgctcttacacaagggagctcagtgtaggagtgtggctttgaacttataagaaggtacattaggaggctagtttctctcctaccgttaatgaggttaataagcatgttgtgtctgggcatcacatgtttggaaaatgcacttagtgctgctgcctgctacactcaggagctacaggtgacacttcttggccctgagcatagtcattccatataatgaagcaaaattaaatacgtaataaaaatgtttgtttaacactgtttgcctgaggtctgggcagactgccgactctgcctttctaactgcgggattctgagtgagatcgctcagtgtgtagagctcattgcctagaacacagaaaacaggggagaacttttgggagggttagccatgctggcacttgtaaaatactggacacatcacagtcagttgatactatttgttttacttatgctagctaaggagatgatgttccaaaattccagtaattgagctcagtaagacttcttcctcccagcctcccagcacagctctcagtttccagaagatctgattctgtgttctttctctccacaatcaaaagccagcagtgatttatttctgttggtgtgatggctacggaggtgaagggtggatctcaggacagtgtaaggttttgagtatcggacctgaatggttatcttcctacagatgctgccattgccattagcccagggacatgtgctgctaattaatcacacccactgagaactgagtgaggaccattctcgagaagcaggcactaatagcaccccgtttccagttactgactagggaggggctctcactagcttctcaggtattctggaagtttagaccgaggtgggaaggtcatgttcttcagtgtgtctgcttgctcaccttaaaggtcgcagaagttaactggcatctgtgatacagtcatgaagtgtcacacaagtgaaaacaagccagcacaaccacctccaataaatccatggggaaactaagattggttttgaattcttgtgattgtgctaaacaagcaggaaacatgttgtctgcaagtgttgaaaatgagcctgtgcatttttcatatggcagagtatttcatttttctgctgaaagttaaagtactttccttctggcaacctcattttgatatatatatgtatatatttgaaatattgctgcattgttagggaatgaagtctgcactccattttcttactcttcagcccctcaggaaaccataggaaaatgaggcaagagtagcgtcttcctgccttgttttcctgagcggtagaaatagagtcaggcctggaaggcctcttagcctgttatgtcactcctcagtctctccaaccgcccggctggactatatcttacagcgcgataaaggtcagagcacaggtgctttctgttttatgagagggatgcccttgagtcaggttcacagacgaagacccgccggcatgtactagggctcatctttcccttagcagatctatctgcctgtttgcattgccaccggcttttagattacttgggggagatgacgaacttcacaagagatcagctgaaatattttgtatccaacagattgcctgctacttccaggtgaggtggaacaggatataagcaccagcgttccatcttatgatccttctgtggacctaccgctcacctctgaggtgaggccaaagcctgctgtgggaaggactcagaaacaaaccgaagaggtactttccggggggttcctctatgacagtactgggattttgttatttcagggaacccctatacttgcatgcttttgtatttttccttggtttgggataatttagagtctatgttgtatagttggtcttatttccatttatatctgatttatatgaagcaatggtgtttggctgtagaagcacgttttacctcatagtagttctgcatatgaactgctcagcagatgaaagggcagtttccttctctcttctcgtctgacctggccatgattgtcatttctgaggtcctataaacctttctattactaaggtaaggccagactggaaacagagaatcccaggctgaaatccgtgcctgaaagaaatagaagtttattttttgtatttaaaaatctgtacaggcttcctacagtgaacaggtctgttcatcagagaacaaaggctctgacttgaatctattgacaactgcttagtaattgttcatatctaggcacacggaaggctcgggaatgtcacctgtccatagttttcaaaagagggaggaacagaatctctactctagcttattctccccagagtgttacctgagagccatttttgctgtcactttacagctcttctataaacatttaacaactacactgcaggtgtgctgggaagtcactgcttaccctgtttaatataactgcgggggtggggggtgaatacaggaagctgctaaggactctttattagtgctttctaataaaaacctctagggtctctctttgatttacttaatcgctcagatgctctgtaactgcatattcagttatggaaccagtcattcaatcagagataacctatgcgtttccgtcttcaatgctccttttccttagagcattcggtttactatattgaaagtgtacccagggtgcttgcaggcttgcactgaacttccaaattgcttactagacaaatcagccaggacagccgctttccaatatgctgtttgaattatagattatatgctctgagctgtaagaagctaaaattacagggctcctccaagcagaagtctgtttcattttagggcttgtttatattcttggctagttgtggccatataagttactgggtcacacttggcatggcaccttgtagtttaagaaatgcaattacttttaagtcagttttagtatatatatatattttagaacagtaatagaaattattataaattagtttcagctagtggttaaaggtgcttattctggaatctatatgatagccagtgaaattcaaattaaaatggcaagtttgatacccaaggctttgcacaaaataggtaagcatttatttttccccatttaaaatttttttaagattctcatgaaatgtgtttttattatattcacccccaattcttgacttctcctaattcacccttacctccttaacctctcccccaagttttccataaattctttcactatataaatctctactgtataaccgttgcacttgaatttattacatagcttaggctggctgttatcttgcctcaacctcctaagtactaggatgttaggttagtaccacaatagccaactttttttataggactctaagtgtcctaacagaaagcgtgaacattttaaaatgttggagtcgggttggagagatggctcagcagttaagactgttcctccagaggtcccgagttcaatttccagcaacgacatggtgcctcacaaccatctgtaatggggtccagtgccctcttctggtgtgtctgaagacagctacagtgtactgatatagataataaataaatctaaaaaaaaaggttgagtctttaatatgagcaacgttggtgttgataactacagagctgcttgtgactagttttggctgccattgggctctctgggctgattctttggacataagattcattgctttctgtttgctttgtttgcaactggggctcatgaggtagccaggtccaccttgaatgtgcttattttcttgccgattagcactgagatgacaggtatgcaccaccacgcccacttgggaattttaaatcattatttgtttgagagtcattttagtactgcctggcatcctaacactgaaccaactctgccttggtttagtagctcaaatcttatctttaaccacatagatcattaaaagattctaatcatcttttccagcaagtgtctctctcctgagggaccatcaaggagcgtttgagggctggagctggtggctgctttcagtggcttcagtctgaaagctgaatgtggtctgctgtgagtcctccttcctcacaaatgccgtttcagatcccacacctctctgatatggattggtctctttgagcccctgcccctaccagttctattactggtttatgtatgtgtatttccccctttgagaggggcattttttcagatctctaactaatatttgtcaataaattcttgccttgattcctctgattggatgaattttggaggtttggaactgctttctagggcaagaagagtttatcccattgagaggggaacttggttccctggagaggcagctgtggcagtggtcaggagggagcttgagggcctgtgttttccatttcacagtgggattcgaaacccttccccacccagctagttaatttactacaccactctgttctagcctgtagctaaatgctaccattattgatttgagcattagtctgtgttccttaatttgcctatgtggtattttgaatgaaaacggctcctcctttagcagtgtctctgcaagaatcagtcatgtgagcaattttaaggaaactcaaagtttcctaatagtacacaaattctattcccttagtggtcacaaacaattttcaattagacttgaaattagacatctgaaatccacacgtttctctcagatccttaggcaaaaataacaagttaataacttaatttacacttgttttttgtttagcagcaggggacttggcattgtataacagtgattcttctctgaaataagccagaatttcgatttgtagttgaaactttgtagtcatataacttaagatcctaaaataaactcacctagaaagaaggcttccagctaacacagcagtcagtagctagaacatggactggacatgcagccttactgtatgtgaagggcatgcagccttactgtatgtgaaggggcatcacttggatggtctcagtgatgctttctgaatggcgtgacatgcatacatcatttcacttgggattacatatccctgccttgtcactcatttctccaactctctataagtttattttactgtaacataagtatcagaatgagctcagaaccaaacatagatatgcaacaaataatttactaaataaacctgctgaaatatttggctactctgctctaatctccccggcagtggctcacatgttccttgccacctgccccaaactctggattcttgaataaaagaaacacacacacacacacacacacacacacacacacacacacacaccacgtgcagtcttctgttttaataggttttaaacatcgcaatggctggaccactctgaaacttccatattgctaacacctcctctctgatactcctgagttattacttactaaaatctatattccatctttgctaccctagacccaaattgggggcagggggtggtggcctggggctgctcttccccggctcttacatggctggtattccgtcttctgcagctctcaagcacgcatcttattccttccctggcaatggtgattttcctccctctcctgtattccttgtctgagaacctctccctgcctctgtctccctgcccagccactggccatcagcaactttatttaccaatcaaagtcaactggagacaggtacttacctagtgtcttacatacagatgtatggctttctctgtaattttgggagctaaattaacataagtagcattagaaccagtccacaacatacaccaattctttttttttttttgtccagaatatcatatactcaagttatcacccaagttctcacaatcgaaattagaggatacccacccagtcttctcagatatcattctagtaccctgaaagtccctccacttgtgaaggggcaaatatttcctagaagtaaatgctttggatatagaaacagatgtgagtgtccttctctgaagtagagtaggttaacacaggcttcctgcactggtggtttgtagaactaggcattttggccaccatttgctcaaggaagctggcaatggcctgtccaacccagagggttggactcagcacaagatgaatccaatgggtgggtctggctttgggaaagtgaattttggggttcttagtatttttatctcaatctacaaactgaaccactgactcccactcttatgatccctcaaagaattcctttgatccctaagaagggaatatgactggatggtgaataactttcattcttgtttggacaaaggccagactgccaggacatataatagtcatgggcctccaatggttggactcccttacatgtgctgttcgccagaccctaggaagttcctctctaccaggtacaaactatttaggcatccattctatcctgctcctgggccctgagcagacatcaataacaactgcaataatcacaggtaatattaagagctaatactgggctgtcgatgtagctcagcttgtagagaaggcttgcccagcatggaggaagtcctggatttgatcccctgcccccaacactacatacaaccagtcttggagagtcctgcaactccagcacttgagaggtagagtcaggaagaatgggcatttcaagatataaccagcctgtggtacatgggctcatgactcccaagaaaaaatgaagagctgggaacgaggggggatagcttgctcagtcagtgaagcccttgccatacaggcctgaggacctgagttcaatcttccaaactcaaagtttaaaaagcccaggagctagagatgctcagtggttaggaacactgcttgcaccaggctctgcactggcagagcagctatggttctgctacattggtggtcagtggagggcattgctgaagagggctcagccttccgaggcagctaccagcttgtcctctctgcggctaccgtttgtcaccaagcttcaatttcaggagaggaatttttgcactgggacagcctagatcttgatctgactcttcctgaactcgctgtctcttaggagccccactggatgctggcttctcttgctcagcttttgcaggtgtgggaagcggcgcatctctgtagacacggtagcctccaatcaggcagtatgtctctccatgccaggcaatctgggcttgcgcatgccctttgtagaggacgtggtagtattcgggggaagaaggagctgtgggaggcatgggcaccagtgctgatagaggagttgctgagtcacggttgggatgaacaagagcttcaaggtgtccttcgaggaaacctgcttcgggtcttcaggtacacaggatatggagaaaggatagtgtgttagtcaggcctctctaaagagaatggatagagattgtatggagtgctaacagccagtactccggggagtcctgcaatggctgtctcctgatggaaagaccacaatgaactagctgcccagtgcacaagactggatgccttagcagtcccaaaccagtgctggagacctaggggcttcctggagagctgttggtcttcagtatccatcagaatcccaaagtagtaggttctaatactacttctttgtatcttagtatcggagacaggataaatgagctttccatcgagaaagagggcaaacaggcaaaaaaacacaccaattcttactactaactgggagccactttgtgacagtcatatgattgaaatctgtcatggtctgaatatgacccgtcccccacatactcatgcctttgtatattgtccccaagtggtagtgctattttgggggacttgtggagcttttggaggctgggctcttgctggaggtagtgaggtattggaggctgtatagcattgtctccctgcctgtcctctgcttcctgctttgtgttgatgggaacatgcagttgtaatatgtccccacatgacgccaccaagagctggggctgatctttccctgctgtgttttctttcttccctttggagttggcatgtttactttggcattgctggaagtgtgtggcatcttgaatttacaggggctcatggtttcaaggttgtctgagtctcagaagagactgcacttgaagtagttacagaactgctagactatgggacttttgaaattgctgcattcatttcacattataaacacagtcatgagcctatgggggcaagaggaatgtcctggtatgaatataaaatgaaccatgtagatttatgtctgaacacttggtctacagccagtgatactgttttgggaagttgtggaacctttaaaaggtgaaaggaagtgtggtcactggaggtggacctctaggttttatagcctgcccacatccggtcctcactatgcttcctagcctatgtagattccaggaagtgcttgccatgtgctcctacccccatggagctgcctgctatcataccttcctcaccatgatcgctgtacctcttacctgctatcataccttcctcaccatgatcgctgtacctcttacctgctatcataccttcctcaccatgatcgctgtacctcttacctgctatcataccttcctcaccatgatcgctgtacctcttacctgctatcataccttcctcaccatgatcgctgtacctcttacctgctatcataccttcctcaccatgatcgctgtacctcttaccgtttgagccaagacactggtctccccgtttggttgattttgtcaggtctttgctcccagtgatctgaaatgtaactaatccagtgcttttgtctctttctactctcttggctcctttcccacaatgttttacatgttgacatctctcttcccactgttgacaagaagggaccaagagaagggaacaaccttctgtcccctggactgctttttggctggggtgtttctctccctgttttctcactcaaatttgttagtgcttccagttgaattcctttcccctctggtttctacccgacttcatcagggctctggctactctcctctcattcctctttcagtaagctactgctttggctttagttgagttcctgtaagcattcagaatgaaggtaccagttgttcaggggcccagcccagtggttcctttgtggcattttgggacatggagatccctgcctatactgcgatttcagctttaccctatactcttgccttactgcctctcccagttgttgctcacctcctttggaggtttttgtctaccctctcctaagaagtcagtgttccccagggttccatccatataccctgtaactcttctctctctaaatgtttgaatcaattttcatttaaattctacctattgcacttatatctctaaatgggcatgtctatcttcaggtctttccccactctggcttcaggtttgcctttgtcttcagcatcttccagagatcctcaagtacagtgtgttccctgctgctttcctgcctgtctttcccctttgccactgctgccagttcccaccgagcactgcctattttccttcctacatgttttttatatctttcctaccagtgctccattgccttgactcttgctcagaccactctagcagggtctggaaagccttctgactccagactcatccctccgaatcagttaaaccctcagtttacccttcagtgtgagtcacttaattctaatctccaagatgacaggcaggccatccttctttttggtgctgttactacctgttccattataggtgttcattaaaaagtttatgacatgaaggggtgcatacaagaccaagtatctttcctgctttctaaagattctttaggggcttttgatcatctctaagatgatgttgctgccttgccatcccttatcactgtgcccccttacaggtatgctcagataatgctgaactttcagacttgaaatgccgcaccttatctttacagcctgctcataaaaactctcctgtttgaaaagctgtactcttagcctgctagccagtaaactttctaagatctcacttaggtgtctaaccatctctgattccttcccaacccacttcagatgttcctgtgatcctcagatcctaccacttcacagttcactgtcatgcgaggtttgtgctgatctaatgtgtcggtgactttatgctgctctttctttgtgtcctggagcctcagacaatggctaagatagggagggccatgtacattttaagaagaataaaaatgcctgcatggctgcagggagctcttctcataccttgggtgctgagccacactgaagcacatcccccacatggcttcacatattctgaggagtgtattttggcattataaatatgaaattatgcctatttttagtttcttctgtttttctgtttgagcatttaagtcattttctaagaaaaggatctagcaatagccgctattaataactattcatttgtaagtgacaaatatctaagtatatttttatttttaggagtttattataaataatgcttgtattggcaagttttttagccttcagaaatctatccgttttttaaaagaaatatatcctttgctattaattttaattcaaaattcctgtaaaaaaattctcagcacagtgagaattcaactgtatggaaaaacacctttttttttttcatttaagagagaatttctttacctgtagtaccattatgatggtactttccacaacaatatggactggatcatattcaatccaatgtggattggaacaataatccagccacattatgattggatctcagggaaatgggggtataaggtggcactggaagtgggtatctgaagatctaacctagccaaaggagttagccctggtcaggagctctgagatggctaaaccatgagcctagttcactcagaccacctgacaaagtggcagagagtgaggtgaggtgacatgggggctggtatacattctgaagaggaataattcttgtttgggaaaatgagacttctgaggttcatgctatgctatgcagttatcctagtgaagatcttgtcacaggttagtgagaacatttgtttattttgtcttctccttggtcatgaaaccctataggcccaggttttgctgcactcgtgttgtgttcccattatctaattcttttatttttgttttcagctgaagcaagctttatttaatactggccaggaacatggactggccaggtaccgacctgggattcccagagaatggtgctgagttagatcagtcaggtgtctaccaaggccagaatgtaggttttggtacttcccacttgcatccagctcgggccaagcatatattttaacatacttactgcccacgtacctcacactttcttgtgatcaagcacattttgtacatttggggtaaccaaccttgctttctaaagtgaaaacatatgagttattaatttaaataaacagtagccctcagcattctagggactaatctgtccttgggcaagtggggcaagagattaactttagtccttatagactatgtcagttaagttaattgatgtgtgaaaacccagctcacagtgggtagcaccattccctaggtagaacctcctttgagtggagaaattgtgttgattacagataagcaaacaagtagacatgtatgcatttatttatttctctctactcttgactctagatataaggtggccaagatgctccaagtttcttccttgacttctccaaaataatggactataacctgaaattagtaggctgaaataatcactacctcccaagttcatcccggtttctttctaccaatctgccactattcactcacatcatttctttgtcacttccacttcataagtctttagaaaatactggcttttgattttttttttttttttttttagggttaacaggacatttattattattttttttttaaccattctttggtagatcttagttttttcaaatgatatatgtaatatttttcaattataaagaactaaattctaagagcaagttaaagcctgtgttttaaaaagtcgtattaatgagtctggggttttaaaagagaaattaaaccatgtttgagaagatagttagtgaccggacaacacgagtttgttcaaattacccctagtatctttttagcagtagagacaatgtatatgacttttgagttctgacctctgcagcctaccaaaaacctttaattaactgcgcttaatttgtttttaagtaaatgaaaaaaatcaagtaactttaccaagtagtgatttttttaaacaaaacaaaaaataataattattatttatacctcacctgtagtctccttttcctccagtccccccactccttccttcccaactctcctctgctaccaatatccactcttgctctgttttgcttcagaaaagggcaggcctcccttggatacatggcatatcaagttgcaataacactaggcacctcccctcgtgttaaggctagatgagggaaaagggtctcaaaagcaggtaacagggtcagagacagcccctgttcccactgttaggagttccataagaagaccaaggtacacaatgatcacatatgtgcagagggcctacgtcagtcctgtgcaggctccctcattgtcagtttagtctctgtgagcccctatgagcccaggttagttgattctgtgagtttccttgtggtatcctttgacctttctggctcctacagttcttcctccccatcttgcacatagttctccaagctctgcctaatgtttggctatgggtatctgtatgttttcattagatgccaggatgaagctcctctcagttgggctagacaccagtctatgagtatagcagaatatctcctcctctttctcttcttcctcctccccctttcctccttctcctcctctttctccttctcctctcttttgccagttatatttggttttgttctactctgggctatctagtatttagtctctgggtcctggctctccaggcaatgtcaggggcagatttcctcttgtggtacccagtacttaattcttaataagtgtttattaagtggacaggtaaaggggaggggtttggaaatgtttatgtaggaagtaggaagagcatgatatggtatcaaagggattttcatagccaagggagtcgtttaatttgaagtaataggccagcccccctggaaggtagatgaaggccaagtgtccacgtgtgatgagagtggatgggttcagaggctcagggtgggattctgaatcctctcttgggacatatgtgagatgcctgcagcttggtaggtatgcagttactgttctctgatgaggacataaagagcttcaaagatcccctgagacagaatacatttgtagaggatattggccaggatcagtgagaatcaggtgcctacatagttagttaaggtagactacagcctggtctgcaggcctcagtaattcttgacagagttggaggtggcttagacatgtacattctggacaagaacatcaagtgtcaccatgtgtgcatgtctcttattggagccagtcttatcaacagtgtctctgttactgtgtaatgaagataaatttaatttcagaaagtgatcagggcacatcagtcgctttcttgtgcaggctgatttgcttcccacatgtagctgctcttctgaatacagtcatgaccttgcacgtggccctgagtacactttcagtggaggctgtgggaactgtacagcctattcagaaaaggtcgcttctcccaaaggactaagcgttggttgatttttgtttgtggtttttgaacaaatgtgactttgaagcagattgaactgtgttcaaatgtggctattcttctttactagccttgggcatgctctgaagtctttcaaggcttcatgactgggaggccataggaggcactggcagggctgatggaacgttactgttgatacacttgtgaatcctgatgctggggcagacccaggatgggaaatcgttcaatggcagctcttacctttcctcatcaggaacatggaggagaggaccaggcctctggaacttgttgggtggatcatagtggctgattttaaggccccagggcaatgaggggctggcagtctgctattggcacgtcatactttactccctaatagggctctctgaacagctctgcttttctgcttttctgttcactgtagtagcagcgtgtggcatttttcacacatgctgcagaaaagctcctccagagatcatcttccgtgcgagaatgttgaaagctgacaacagcaaagcttctgtgcatgtttgcactactgtttaagccatagttttcagctgtgtctgcaccaggtgcagatggggggggggcgtgttttcactgtttcacacaccattggctttgcgtggtaattttcagggtgtgaattaatgagatttaaggcattcttttctgtttgttggaacatatactcttttgaaacaaacaaacataaacaaaaaaccaaacttttctcccatgctggagaccaaacaggatctttcatgtgccaggcaagtactctgtcaactgaacacaccatctgccctgggaagtgggctttgaatggctcatcctttagaaggtctttaaaatgcacaaaaatgtaaacacatacaaaactcacctttctttgcagctatgctgatttacaggtagactgtaatatataaaaagcgagaaagaggaggatgttggacctttaagtttgatcatacatgtttcagttcctcctgttattggacaggggttatgggcattatctcaagtatagtaaatgtagagtgtttttaatttaagtttgaaagattacttccttatagatatttttttagctaatggtgaaaaggttgttgaagaccttaaggtgttttttttatagtttaatggagcatctagcttttccgtatgcctctattgctggcactacctcgtggcaaagagtgaaatgaatgtgtgcaaggcagacctgattcttgccttgggggcagaactagttaatgatactcactcagatacagcatgatacaaatggggcatattatgaggcttaaattaggtcaaattgaataattgaatttatttctttacttaaaaacagcttaatcagctgagagtgccgagagtctaaaaaaagcttcattaagtattaataggctgtttgtgtttttaacttcatcttcacttcagtgatgtttctctctgcctttggtaccttttacagatacttggagatgaagttcagcccttctttctcgatgaagaatttgattatgacaatgtgactctcactcctaagtttactgctggagagatagcaaccatccaagagctatctaagcaaaagagagtgggttccggtacaaacgtgtgcgaactccatgactgatgtctctgggtttagttttattttgttcacactcaagcgacattagaataaagcatatgtcaactgattccctctgtggaaatgtacgcggctgtattcatttgtcactgttgtttatcaccaggacacagattaatcaagaccaaagagatcgctttctcttctgtcccatggccatgtcctgtgactgcttgggacgatggaagagggaaatggggcaggagataagggatgctgaatctgcatgtgattaaggcaccatacaaggacttgagtgtgttgtgctgaagactgggaatgtatgtgcattttttagaggtgaaggacaatcacacgctccaaacattaccaggactaacagaatcacatatgtatgtagggctttggtcc

SEQ ID NO: 427 - DNA, 1093 bp, Mus Musculus
accttataggctgtttgactggataaggactccaaacgtgcgaagggactagatggacgccatggtgacggacagctagggaacgggagagtggccttgtgaattgaaatgcttgctcaaataccgaggccagagataatggatgaagatcagttaatgaaagaagtcttggataagtttgtcaactgccatgagcaaacctatgaagaatttctgagcactttcactcatctttcaaaagaggataatgtggccaaatggggagcacatggaactgattcatcagaaaatatattttctactgtaaaatggaatcataaaactgaatcaaatggtcgtcattttagaaatacatccatctttcttcacacttcatcggaacactcagaagaggaccagattgtgattgatgaaggccacaaagttgggagttcctttcaaggtgatatgacccgggctggaaaggtgaaggtagacaacttcctagacttagaagatgtggacatggaggaagagagtaagccccagatgaacaaggatacttggagatgaagttcagcccttctttctcgatgaagaatttgattatgacaatgtgactctcactcctaagtttactgctggagagatagcaaccatccaagagctatctaagcaaaagagagtgggttccggtacaaacgtgtgcgaactccatgactgatgtctctgggtttagttttattttgttcacactcaagcgacattagaataaagcatatgtcaactgattccctctgtggaaatgtacgcggctgtattcatttgtcactgttgtttatcaccaggacacagattaatcaagaccaaagagatcgctttctcttctgtcccatggccatgtcctgtgactgcttgggacgatggaagagggaaatggggcaggagataagggatgctgaatctgcatgtgattaaggcaccatacaaggacttgagtgtgttgtgctgaagactgggaatgtatgtgcattttttagaggtgaaggacaatcacacgctccaaacattaccaggactaacagaatcacatatgtatgtagggctttggtcc

SEQ ID NO: 428 - protein, 147 aa, Mus Musculus
MLAQIPRPEIMDEDQLMKEVLDKFVNCHEQTYEEFLSTFTHLSKEDNVAKWGAHGTDSSENIFSTVKWNHKTESNGRHFRNTSIFLHTSSEHSEEDQIVIDEGHKVGSSFQGDMTRAGKVKVDNFLDLEDVDMEEESKPQMNKDTWR

SEQ ID NO: 429 - DNA, 945 bp, Mus Musculus
cgctgcttcatgacagaaaccttataggctgtttgactggataaggactccaaacgtgcgaagggactagatggacgccatggtgacggacagctagggaacgggagagtggccttgtgaattgaaatgcttgctcaaataccgaggccagagataatggatgaagatcagttaatgaaagaagtcttggataagtttgtcaactgccatgagcaaacctatgaagaatttctgagcactttcactcatctttcaaaagaggataatgtggccaaatggggagcacatggaactgattcatcagaaaatatattttctactgtaaaatggaatcataaaactgaatcaaatggtcgtcattttagaaatacatccatctttcttcacacttcatcggaacactcagaagaggaccagattgtgattgatgaaggccacaaagttgggagttcctttcaaggtgatatgacccgggctggaaaggtgaaggtagacaacttcctagacttagaagatgtggacatggaggaagagagtaagccccagatgaacaaggattgcctgctacttccaggtgaggtggaacaggatataagcaccagcgttccatcttatgatccttctgtggacctaccgctcacctctgaggtgaggccaaagcctgctgtgggaaggactcagaaacaaaccgaagagatacttggagatgaagttcagcccttctttctcgatgaagaatttgattatgacaatgtgactctcactcctaagtttactgctggagagatagcaaccatccaagagctatctaagcaaaagagagtgggttccggtacaaacgtgtgcgaactccatgactgatgtctctgggtttagttttattttgttcacactcaagcgacattagaataaagcatatgtcaactgattccctctgtggaaatg

SEQ ID NO: 430 - protein, 244 aa, Mus Musculus
MLAQIPRPEIMDEDQLMKEVLDKFVNCHEQTYEEFLSTFTHLSKEDNVAKWGAHGTDSSENIFSTVKWNHKTESNGRHFRNTSIFLHTSSEHSEEDQIVIDEGHKVGSSFQGDMTRAGKVKVDNFLDLEDVDMEEESKPQMNKDCLLLPGEVEQDISTSVPSYDPSVDLPLTSEVRPKPAVGRTQKQTEEILGDEVQPFFLDEEFDYDNVTLTPKFTAGEIATIQELSKQKRVGSGTNVCELHD

SEQ ID NO: 431 - DNA, 49226 bp, Mus Musculus
  misc_feature (1)...(49226): n = A,T,C or G
cgcaggagctatccagcacgtcagctccctgttttggcccagattgcaagaagctcgcctgcggccacacggtgagttccgcagtgatgcaggtgatgcggtctgacttgtcattcagctgaaagcgggagtgcttgtgttccttgggtgtgggggagcatgcccttcagaaaccctagctggggtcagacaaaggatggatgcggggattacagggggtggttataaataaggggggggggtggagttccgagagcagcgattgggtagttcatccgtgggctagccagtaaagaaaacatcctgtattcggagttcatgaagaaagatggagatgatggagcctggtgcccgcatccagcccttttatcacagcggtagattgtgctgttaaaatagcggtccttgactctttgaagagcatggttttaatgtctgtgagttgcaaggaaaggccgttagctgcagacagataaaatgaagtatttgttttagggaagatatttggcttgttccctacctttttattccctattcccgtgtgaatgctcaaaagggtttatctggctatggcctgaagcacccatcctgaacgagcagctgccagggaagctgtgtgaaaactgtttccttgttcagcttcccgtggcttctacggacaccaacatgtaaggcagatttatcccccaccatgtcactgtctttcctctccctgctgcttctgcctccgcaaaccttaactcccagaaccgcttattaccatcaaggggctagacgtgcagggggcttactaggtacctggctttgctccatgctccttacatgattttgatctttatcttcacagtaactctataagatagattgttgctatccttggtctgtagaaaaggaggctgaggaacttgcccaggaagacctagctggtatgcagtcaagcgtctcatgttgcttgcttccctcatcacagagcaggataggagttggcgtacctctctgctcgggatcttcacctattgcctgccggtctgctaagttcaaacaccctcggccactactccagacctttctctgggatattttttgattgtctgtttgttttttactgtttgggtctccctaactcccttttgttattcctttctttccttaaactaggagatcttaaaaattaccaccctccctatctcaaatccaaaagtgcttagattgcaaggatcacagaccatagatgtgagaacatattcctgtccttagaatcctcaggtgtcaagttagagggactagtttatcctagactcttctgtcttcttatttccttcacacagcggtttcctacctggcttggacacaaaagcaaacctctaggaatttttcatttgagtctcctttcagggtggtccttcagcctcaacttgtgagtcatagttatatcaccccagttgtgttatggttgcccattttggccaagttatataacttggtcctttcttctgcaggttaaaaatggcctcaaggctggtctctgctatgctatctggccttttgttttggttgatgtttgagtggaatccagcattcgcttatagtccacggacccctgaccgggtctcagagacagacatccagaggctgcttcatggggttatggagcagctgggcattgccaggccacgcgtggagtacccggctcaccaggccatgaatcttgttgggccacagagcatcgaaggtatgcactcttccaaactgacagtgtttctattgtatttctgagggtttttgttttgtttggtttggcgtgtgtgggggtattgttttctttttttactggtagaatcttatttagaccagactttcactgaacttcctatgtagccaaggattacctggagctctaatcctactgcctccacctccccagtgctaagacggggaaacgtatgaggttctgaggaaggaagctggggcttcaggctaagcaagcactctgggctgagctgcatacctggcactatttctcctgatatgtaattttccctactaggaccacctcacagtgctgtctgctccagggctctaggttgctgtgaatagtgttgatacatgatgcccatttctgtcttgttgctgtcactttgaaccattgatatgctgtgtattttggttgacatttgatttcaggagtagattagcctaaataacttgaatctgcaagcatgcaaccatggcaaatggcttgcatcaagataaatcagataggactccttgccattcttttaggaagagtctaaactctaagtggcaccagtcacctgttcctgtttatttaattttttttttgagatggtaaatatctgctctctccactagtaaagtacatggttaatcactctgctgttgccatggggaagggtctccctggtatcaaaagcctgtgtttttcagagccttgttttattcactcagtcagtatccaaccgtgtattgtcctccatatgcactttgcaggatgctggggcacccctgtcctacgtggttcagactaactgggagaagggaactgacaaaaagtcattacggtgtattctgatatgcactgcttccatggaacaaagagtaggaggtaggtcaggaataggaaacgcttcttaggggaagttccatttggcctgggtcttgaagtttgcataggaaatccccaggggagtgtggtgaaaaggcgcagaggaaggaaagaggatggattacagtggatctgtccttaatcttgaggtaatgagctgccatagcaacgtcaagactcctgtaagggatgggcattgacttgtgcttccattgactgctgctctaccttgaattaccacagcattagcagtttctcaggacacacattgtctcccagttacttctgttccaactctggcagtctctctccattcagagtcaagccaaggtgaattctgatgttacccagccatacagcgacactggtgtgggggcttttaagaagcttgttaaggtgactgactggcagacttcatttccatgcagttatcagctcaagttccctttttgatggctgtcggctgggaagtcccttgggaaggacactgcctcgaatattcctatgcagaatatcctgaacaagaatgttctgttgtgacattttacttctccattatcagcccctttaatctgataagggtgctgcaatagagtcctgggagtgactatcggccacctttgttatctaagatgatagccacttatctccagtctccaccacatgcgggggggggggggggggggtcttgtatgttcagcaggtaagaagaatcttggagccagtttagaattctgtctcttaaagctgaggtggaaaatgacaggaagtagatcaaagacagtgggcggatagaaatgaagtacaaaccttgagcttttcccagtccatcctgggttttagatggatggcctggttcttatttttgtgaacagatcactgttccactcgcccatctgtctgtactctatgctcagagactcactcacaccatgtggaatagctccttccattcttttaccagcatcagagagaatcagttaaaggtgtccctgctaccccctcctgatttttatagagaacacacacagtacatgtattcctgtgaaaacttcaaaccatatggaatggggttgctatgagttttgttaccagagctccctggatttaaaggccaaccccatcactttctggtgccgtcatcttttagtaagttatttcttcatttctacttagcttaggcacgcctctgtgggaaccttaaaaacagccaagaagtagcatcttccaaatgtataaaattgttggccaaaaccaagacaaaaggacaaagtaaagactgccaggaagtgagtgcccttctaaaggcaacctcaggaggtcgatggcaggagaacggagtctgagccgtgtacactcggcttgcttgcttgctacgtgagatcttggcggcctctctgagaggtgattttcttatggatgaaataaggcttccttcacatacagtcatgtgaactgttaataaaaagaccgcaagaccccgcctctgtgtgcagcagcagcagcagcatgagggctttacttgtttgtcagtttttatttgttgtttgagacaggatctgttacagcccaagctggctttgagcactgtatgtagccatggatgaccttgaacttctcacactcctgcccccacctcctgggcttctgatcatctttctaactgctcatcaccagcgttggtcagcttccacaccttatgtttccgccctcctcctcctcccccggctgctggagcaggtctctgtgacatggtaaatgctactgttttcccttagaggcagggtaagctagcagctctcccagggacagactaggagagctgtttactaagggtgaggactttggagagtaaaaactgtctctggtgactgacactcttcttgaattggggttgatcgaaccaggacagatagtctagcccttgaatattaacagcctcaggttaaaaataaaaaaaaccccaaaacagcagcaaactgttctcctaaagtgtcagctgtttcttcctccaacactttaagctactgaatacttagcactgtggtaacactaagtctcaaaccactaaacagacgttataaatatttgatgattgtaaattttacttatattgttaaaatacatcaaaatatttttataacacatttagaaccttaatttcattcttttcaaaataaaagagagctgaaacttttaaaaattgtatcaaatgggggggaaaaagccctttgtaaggtggcattattgaaaaggcaagtagattttaataagcctatgtttggccaaatttgaataaaggagctgcagtacctctactttgccacgaggtggcaatagctgcctcccaatcaaaggctgacagaaccggggcagtaaacatggaagaggagtctcactttgtttctggagagtctctttctgcatttagaaggaggaggggatgtggaaaggagggacaaagtgagatagggnnnnnnnnnnnnnnnnnnnnggagggagggctgtctcttagcccagataacttttctaaagtctctttgtagttttccccattctagaggaaccaatgataactttgcctgcgtcggtgtctccagtttttcctatgccctctgaggctgccttgaaatcactcacacaactgaaattcttgtaaaaaaaaaaaaaaaaagaccttggaaaatgattttaaatatcctgtgtggattagctgcctggatacaaatcttaaaacgttttacatgcaggtaggctagggaagatgaaaatgattgtgtcgttaaggctctccagcgtgtctgggaaggcgtgaggatggttctttggatatgcggaacacaagacagatgtagggggagggcattttggagtcctctccttgacaggagtggctgaggctatcgagtggatgagctgtctaggcaaacattgctgatggggacagagcacctaagacgaagttctgaagaacttgacacaaaagggctaggcaccccaagcactggaaaattgggtggagtcaggaggattataaatttgagggtggccaactttagacagtgagttccaggttggtttgggtccataatgcggccttgtctcacaatcacaaattccaagtagtagactcagtagctgtaaagaaggttatggcacttcaaagaataagcagaaattgtcactatccatgactattgaacaatataaagtattggttcatcccccaaataaataagattttcttatggtattgtcttagctaggattactgctgctgtaatgaaacatgaccaaaagcaactgggggaagaaagggtttagttagcttacacatctacattgtagtccatccctgaaggaagtcaggaattcaaacagggcctgtacctggaggcaggagctgatgcagagaccatggaaagatgctgcttactggctcactcctcatggcctactcagcctgctttcttagagaacccaggaccaccagcccaggggtagccctgcaatgggctggaccctccctatcaatcacaaatgttctacaacctcatcttatggaggcctttgctcaattgagtctccctcctgtcagataactccagcatctctcaaggtgacagaaaaccagcaagcacagaggtcaaagagggccatagaaaagcagcaaaattagcaaggtgaaatttcatgcctagcagctgctaacttagagaagtcagttatttggagcccagcttgtcttcatccgcccaggtgactcggtctactgctcgcagctcttgaccgtctagatcaggccccggctgaggtgtttgatgacagcctgcttcacgcttcagggctagctgactcttgacatggccgagaggccggagaattcatggaggacagttgcaccccctccacattgggggttcagacttcagtataatttttaaggggacataaacactgagtgcttattccagctagtgtccatctgtgggtacagggcctgagctagagcttcttgtgagctctgtagcctaactcattcttccgaacaccaagtcccagctgtgtgcagccttcatggagaagcagcatttaaaccatgcactcggcccatttctgtgaccgtaacctgaatggaacaagtggggacagtgaactttgctgcctctaaattctgatgaggtttaaaaaactcttattttttttctaaccctttttctcccaccccactttccatattgttcacacgagagtttggcaggtgtcttagtcagggtttctattcccgcatgaaccaagaagcaagttggggaggaaaggatttattcagcttgcacttccatactgctgttcatcaccaaaggaagtcaggactggaactcaagcaggtcagaaagcaggagctgttgcagaggccacggagggatgttacttactggcttgcttcccctggcttgctcagcttgctttcttatagaaccaaagacaaccagcccagagatggtcccacccataaggggccctccctgtttcatcactaattgagaaaatgtcccacagctggatctcatggaggcacttccccaactgaagctcctttctctgtgataactccagcctgggtcaagttgacacacaaaaccagccagtacagcagggaaaaaaattaatctaagcatagcattcctcccttcccgtctacttgtaaggcacggcttcgaagctggcagctaagactccttgcactttcctgaagtgtgggcttaacccaggaggcgtcttggttcctggagaaccttggctcctggggttttttcctgtcaggcattgtctgtgcaaagtccatatctgtgcaaagcccgtggtgtttaaactagaactctgtctcatgtcacctgattcataccatctggaaaaaaaacccccggcaacaagaagcaccatgagtcacctggaaagccgcaatgaaggattttccacagaaaattgacaaagtggattacgtacacaaagggaagggaagagcagtaacccagttttgtgtaacatttatggttcgcagagctgctttcctgtaactgtcttatttgatataatcatcctaacgaccgaatctgtttatgctttcccgcagtggcttgggttttttaagtttgttggcaagccagctattttaggtctgagtacatctatccctgcagacttgtataatcctgggctatttagttgagaaacgattatgagtctaggcattatggtaaaccacaggtgattttggtggctggtatttcagggacctgaggctacaggaagcgaatgttctgacaagtttcccttttggaacaaattggtgcaaacatcttggtcaccgcagtccataaagagttagtgaagcaggctgggtttagcagaccacagttaggcacggcctttaaacctgagtgtacacattggccactgtgcaacgtgtgccatgtgagttttagcagagggagaagcgtgtggggtttggggtgggggaggtgagaggaggatggtatatatacagctagcagggcgtacattgagataggctattctagttcattctcagagaagttacaagactacctgacagtttactttcccagtctcaaaatggcgataagctgtccggtccatctcacagtgttgttgtgacagccaaattaagggggatcaaggtattttgaaaaaggtaaaaagtgttctagagacatgaacactttgtttgcttgcttgtttagcgatgcctggaatccagcccaggtcattgcccttgctaggcaaatgcttcaccaccgtgctccatctccatctcacaaagcaccgccgtgctctcgacttcctctgtgctcccatagtcatttccagttacaaacagctcaaagttgaaaggtgatcctatcttcccgttccctgtgtcctgctgcgctcgggcctgagacacagcgctcccagccgttgcttatgaatcctaggaggagtcggtttccctggccttgtatgtaccccgttggcggtgacgtaggagttaggatcacagggctgcagcgaggaacaatgcttcgtgaagatgagcgagccgcaacttcccctctcagacttgcccttcccttttcttgcttttatgactttatgaccacttcagcaagagttccaaaagtgaaacatgtcacaaatgaacatcaggtgctgctgaaagaccagtgtgccgatgaactagatagaaatctggcctgcgttggactggaagcagactgtctacttgctggcctctctggccatttacaccaaccagcatcccatcagagtgcccattaatgcatttccacttgtatccattcaataagtaattaaattcttacgttgttccaggaactctgtccttcataggtttcaaaaccagtatgcactgctctttcagaattttgtaaaccaattacaaatcgggcattatcggaacctctttgtgaaggatcggctccggccagaggaacatggctgtgctgtggaatatgagggtggtggcaggttctgattgctgtgttcctttatgctagctgaggctcctgttggtctttattcaagagccactcacaggaataggaaaagctaacacacaagaaagatatggagctgcgggctgtgtttttgctcagcacctcactccagtaaagtgggctggctaactgaggaagggccaaaaggaggaacaggcccatctaacatctcctatcctgacctgcagccctaagttaaggagcctgaaagagaagtagggaagggacgtgagacgcttactgcatgtctgtagtgtactgggctagaagctgagagtcctatatatagattattacagaaatggttctctcagggccaaggcattgaactagggaagctgacactggaagaatcatcaccatcaccatcaccatcaccatcatcaccatcaccatcaccatcatcaccatcaccatcaccatcctcgtcatccttgagcagagcttctgtgaggatgtatatcatggagacttgggtttgagtagcagaaggaaaggaaaaaaaaacaattttttaaccattgtgtcaaatacaaaatggttacagggtggggtgggggtgtcaggaaaggccatttgagactgtcaacaggtttgtcttatgtccgaacaatggtcacatgaggcaggtggtatataccgcccagcccctaagctcacacaggaaaactcgacctctctcagagcccacattgtacttgtcccttaaagcttccacgcatctggtcaccaccttggtggcaacattagcagtagtcagtggggctggctgggggcacagttcatatatttctgttcgctctggtcagatcccacgcacagagctcacaagcaccatcggaataccagaaggtagaggctggtgtctcttcagcttggtgtttctgagtgttgctcagcgtaagtcaaatacttcataaagtgagcctctctctctctcccaggcagctgttcacttggacatagttgattataaactcccagagaggtgaacacagacccattatggcattttagaatatcctcagtgcagagatggggaaggggcactcaacccacaggaaagagacctgaccgaggcacagtgacactaggggctgagaaggctgctgaggggctttctcccaggaggggactcggaaactggcaatcaccctccacaggaaactgtcctaatttttctttgcctgaggcagaggggacagtcagggctgctggcctgccttgccgaggaaggcccaaggaacttccctaatgccatcctcctagtgggacagctcagcaggcctcgctgagcagtttggataaatgtgaatgactaacgttttccccgcaagcagtgggactggatgggcatgctgggaaggattcctttgctctaaaccacggaggagcgtgcctgtctcctgaaaccaagcagcccgtctcttccgtcgtctcttcccttcttccggtgtttccaggccttcagcagatggtgggaggaaccatttgttgagtctgtccagaccctgcatagttcttggtcactgaagtgtgtaaaaacatggcaaggatgcaggtgctattgtctcgacatgtttacaaaaaaaggagagagagagagagagagagagagagagagagagagagagagaaagcagctattctgacagaaaatgatacattgtactaatactgagaggccttttcttttaatgtgtgaacagtgaatagggctgttggcattggctctcacttaactaggtctgtatacagcacactggagcctgtaagtgcctctggcttttttttttttttttttttaacaggcaaagttttggtgccttggggtgctgggccatggaccagcaagatgtgcctgcaggcagggcgtggccagcttactcccagctggccagattggaaggctggccacagtaaattgtcagtggtacttagtcacgttccccctgaagcctacctgctctactaaagccttctcatgcccctgcctcaggatgtctgtgctgttaaggttggttagatcacctccctaatccccagggaggacaataaaagtgtgaagggttgagaggcaactggcagaatatgtcctgctctgggctgcagcagcagcagcagcagcagcagcaagaatgggggagcacttgaattttgagctctgcttttaatagagtatgttgcgtgtctagaagccaatctgcagagcttattctgcaaaggtaaaaatacaaacaaccaaatggctaaatgagtcccagaagatgtatgtgcagcttttgtggataatggggcatgcatgctgacactagcgttccatgtcctctggtgccttcatgcctctcagacactctatagcacactagctttgaggcataccttgtaggacaggaggtcagtattttgcttgcattgcccactggactcagaacatatgcccctgtgagttcttgctttacagtagggtagaatggtgaattctcttttcatcctttctacccagtgttaaagctctaaaatctggaggaaaaatgatatcagttatctaacatgagaaacgtgtttgaggggtgctggagagatggctcagtggttaagagcacttgcttctgttccagaggaggaaggttcagttcatagcacccatatggtggcccagcatcaagtatatccccagacctgatgccttcttctggcctccaagggtaacagacgcacacacacattttgtgcatacatatatgtggacaaaacatttatacacataaaagtaaatgcttatgtttcttaaatactggacatagatagagtctccacatgaagggtaaaaacagatctgtaaaatacttattcaaagggaaatgttctagtagaagggaaataatccccattttgtgtctaccgtggcccagtatgttatttattacaatttttgtcttcataaatcctatgttctgttttgcagtggaagtggttgagcagtgtgcaaagacaggcttaggacatagaatctagatttggctcacttgtatttgaatctagagcagaatttgcaccctcaccactgttgatacctaggctgcagcatttcccgttgacggtccacatccctagcctctgcccattagagggcagtagattttccccaatgggacagctcaaaacatcttcaggtgattttaaatgttcctagcaggttaagatcttctgttgaaatttagttctctgcaatgtatatgtgcgagtgtatatatatatgtgtgtatgcacatacatatgatgtgatgtatgtgtacgtatatacattatgtgtgtgtgtgtgtctatatatgtatgtacatatatctctccttccttttcatctcttccttctcctatctgtctttttcttacccttgcatattcaaaacaaaatttgggaagtaactttaaggactctaattatgtnnnnnnnnnnnnnnnnnnnncatgctgggaaggattcctttgctctaaaccacgggaggagcgtgcctgtctcctgaaaccaagcagcccgtctcttccgtcgtctcttcccttcttccggtgtttccaggccttcagcagatggtgggaggaaccatttgttgagtctgtccagaccctgcatagttcttggtcactgaagtgtgtaaaaacatggcaaggatgcaggtgctattgtctcgacatgtttacaaaaaaaggagagagagagagagagagagagagagagagagagagagagagagagagagagaaagcagctattctgacagaaaatgatacattgtactaatactgagaggccttttcttttaatgtgtgaacagtgaatagggctgttggcattggctctcacttaactaggtctgtatacagcacactggagcctgtaagtgcctctggcttttttttttttttttttttttttttttttacaggcaaagttttggtgccttggggtctgggccatggaccatcaaaatgtgcctgcaggcagggcgtggccagcttactcccagctggccaaatcggaaggctggccacagtaaattgtcagtggtacttagtcacgttccccctgaagcctacctgctctactaaagccttctcatgcccctgcctcaggatgtctgtgctgttaaggttggttagatcacctccctaatccccagggaggacaataaaagtgtgaagggttgagaggcaactggcagaatatgtcctgctctgggctgcagcagcagcagcagcagcaagaatgggggagcacttgaattttgagctctgcttttaatagagtatgttgcgtgtctagaagccaatctgcagagcttattctgcaaaggtaaaaatacaaacaaccaaatggctaaatgagtcccagaagatgtatgtgcagcttttgtggataatggggcatgcatgctgacactagcgttccatgtcctctggtgccttcatgcctctcagacactctatagcacactagctttgaggcataccttgtaggacaggaggtcagtattttgcttgcattgcccactggactcagaacatatgcccctgtgagttcttgctttacagtagggtagaatggtgaattctcttttcatcctttctacccagtgttaaagctctaaaatctggaggaaaaatgatatcagttatctaacatgagaaacgtgtttgaggggtgctggagagatggctcagtggttaagagcacttgcttctgttccagaggaggaaggttcagttcatagcacccatatggtggcccagcatcaagtatatccccagacctgatgccttcttctggcctccaagggtaacagacgcacacacacattttgtgcatacatatatgtggacaaaacatttatacacataaaagtaaatgcttattgttgggagccgcccccacattcgccgttacaagatggcgctgacagctgtgttctaagtggtaaacaaataatctgcacatgtgccaagggtatcttatgactacttgtgctctgccttccccgtgacgtcaactcggccgatgggctgcagccaatcagggagtgacacgtccgaggcgaaggagaatgctccttaagagggacggggtttcgttttctctctctcttgcttcttgctctcttgcttcttgcactctggctcctggagatgtaagcaataaagttttgnnnnnnnnnnnnnnnnnnnngtcatctttcatgaaggttcagtgtcctagttcccttcccccaggcaaaacgacacgggagcaggtcagggttgctctgggtaaaagcctgtaagcctaagagctaatcctgtacatggctcctttacctacacactggggatttgacctctatctccactctcattaatatgggtggcctatttgctcttattaaaagaaaaagggggagatgttgggagccgcccccacattcgccgttacaagatggcgctgacagctgtgttctaagtggtaaacaaataatctgcgcatgtgccaagggtatcttatgactacttgtgctctgccttccccgtgacgtcaactcggccgatgggctgcagccaatcagggagtgacacgtccgaggcgaaggagaatgctccttaagagggacggggtttcgttttctctctctcttgcttcttgctctcttgcttcttgcactctggctcctgaagatgtaagcaataaagttttgccgcagaagattctggtctgtggtgttcttcctggccggtcgtgagaacgcgtctaataacagcttatgtttcttaaatactggacatagatagagtctccacatgaagggtaaaaacagatctgtaaaatacttattcaaagggaaatgttctagtagaagggaaataatccccattttgtgtctaccgtggcccagtatgttatttattacaatttttgtcttcataaatcctatgttctgttttgcagtggaagtggttgagcagtgtgcaaagacaggcttaggacatagaatctagatttggctcacttgtatttgaatctagagcagaatttgcaccctcaccactgttgatacctaggctgcagcatttcccgttgacggtccacatccctagcctctgcccattagagggcagtagattttccccaatgggacagctcaaaacatcttcaggtgattttaaatgttcctagcaggttaagatcttctgttgaaatttagttctctgcaatgtatatgtgcgagtgtatatatatgtgtgtgtatgcacatacatatgatgtgatgtatgtgtacgtatatacattatgtgtgtgtgtgtgtctatatatgtatgtacatatatctctccttccttttcatctcttccttctcctatctgtctttttcttacccttgcatattcaaaacaaaatttgggaagtaactttaaggactctaattatgtttaaacctttttaaatatgaaagtaataaaagcattgtgaatcattagtacaaaatgttaaagattatttatagtcttaccacttagaaggttccatgtttgacatctatttagtttatgtatttatcctgtgtgtgtgcatacttgtatgtgtgtgtgtgtgtgtgtttagggcccttttactttggtaatttcctctaatggatagccttgaaaataacacttcaaataaaggtttttacagttatctgtggggagattgctgggggctgtacgcacgtgagtgcagaggccagaagacatggtcatcttccttgcagtggtcatcacaggaggttgtgcgcttcctgttgtgggtgctgggaaccaaactcaggtcctctgtaagaacagtaaatgctcttgaccactgagccatctctcccaccttcataaatagtgtttgtctgtatttcgtaggtaatattccagcaaaatattctatatcctaacaagttaatgtcatgatttttagtaactgcatcacatcctcttatacaaatatacacagtgcaaacatcccccaagtggtgggcacttagagtttttccaatttattattttcataaatatttccttactgactatatatgcacatgacccttcatgtagacacctgataaatttcctagggtgtgcatttcagggaaaagaataatttgaccaaactctatatatttttaggttctatttcctcaactactgtcaagttgctctcaactgtttaaccaatggctgcagtgtttctctcttcttccatctcctccttccctctctccctctactctactcatggacagcgtttccatttgtcttctatgacaactgccctttaaaaactccttgaaaggtaaaactggtatcttaatgttttttctttttttcttttctttacttttttttttttcttttttttttttttttttttggtttttcgagacagggtttctctgtatagccctggctgtcctggaactcactttgcagaccaggctgacctcgaactcagaaattcgcctgcctctgcctcccaagtgctgggattaaaggcgtgtaccaccaacgcccggcaccttaatgttttaattagtatttatttcgtgatctacaaacctgcacatctttccgtccctgtgtttttcttattctttgaagtgtttgttaacaagatgcattccttcttcaccagctgtaattgcgcctgactgactctttcatagaaccttgagttttcacaatcagacttgcagcaaaagtttttctaagatttttagtacaagtagagaaatattggagtgaaaattcgggagaagacggggaattaattgtgtgatggccaccaggcggcgccattggctcagaatagaatcattgctctggcgagtaggaggctattacttgacccagggtcctgagctgggctaagtgaagatccttgagagctctttcctgcatagaacaccactggtcgggtttgtagttaacctgacagtgaccatgagtgggcccgatgcgtttgtatgtggtcagggccattcctgtttttgcttaaaatatgtgacagctgtgctttacacagttgcctaataaactgtacagtttcatggttttctgtgtattcgtgtcacagcaatccattttagaatattttttatcatctcagaaaggaactttatctcttttttcatccctgctgtctctcccacctcctctcccctttcccagtactggaagagcactgactaatctcaattctacccctgggcctactttcacagtgactttacatacctggaacctccagtaggtgttctttgtgatgtggatttggttgctttaggctgacagtgctgccccatctggcttcctggcaggagacaggggcactttcaggtctgcttgaaacagtgaccttttaatatgatggttcttcactgtttagccgggaatgctaggatggaagatttctgggccccaggcctcccagcagcttgggtttggtgccctgggtatctacaactggtgacgcttgtttattagtaactctgaccccctgacaaccgagctggcagcagtggggggctcaatctggaggggggaaaaagccaggttttaaatggaggcatcagagaaagaaagcctttccctgtgagccgcggtgccaactccagcttcagcccctgtccctgagcaggccgagacgctgcttactatcaagcgctcctccttgacttagcctgacaacaggacatatctgaaggccatcaaaactaatgacatcagcctgacttactgctcggctggcaaggatctcagcccagcgtagcaggaagagtgctcagtctgatgcctgaggctcaccagaaaattccactggctggtgcccgaggctgttctgagactccagtgagaagtgccacaataaagcaaaccgatgcatgcgacagaatcaagggtcagagtgggacgtctgggaacttcctatccacccaccacgcgcgtttcatagaaaattgagtctgaagagctgacattctttgctgaaggagggcctatgacagctgttgatggaaggtcaactgtggatctgggaggcacggctctctgcttcctcttttcttcctttgcccacccttttcccactcccttccttgggatcaaaagaatcagatccaatcactctaacttttcagaattgagttctcatttctccatggctacagacctagtggatctgtaaatatttgtgctgaatgggtctgagttgaaataatggcatctgaagaaatcatcgatgactgtaggaacatcagagagcagcgtcaagttcctcggggcctgagtcttgtgcaacttggaaacccgtgttaagaaaagcaatacaaactcatatttcaaaagggctggaacagatggctcagtggttaagaacactgactgctattccagaggaccaaggttggattctgagcacccacatgacaccttacaactctctctaattacagatccagggaacccagtgcccttttctgaactccacaggcatcagacatacgcatgatgtatagactgcatgaagtcaaaacacccatgcacatgcaattggaaaataatggtaatggctgcaaggcctttgaaatagccacactcattgtgcatgcaatgagggactgcattcaacttccctgtcagactactgctaggactttgtagactggaatagacctgtttgtagaaacgacagctggtatactgggaagtatttcataaccctcttctctcatggaataaagacagccctagaaatagacgggtactgaacacgtgttccatgtgaggaataccaaagagagcaatgaggtctggaaagggctgcctcactcaggatgtgtggtactgaagcccaggtagagggtgaggccagcttccttcccagctacccacgtctcagtttgttctcggagaatctttcacagttattcttcttctgagtgctttgtccaaaggggagatcagcatggataaagccatttagcattgaggggtgagaacaggctcaagatttacacaaatttttgaagttctgtgtcacgggtggagtcccttaagtccacatcactgtcctgaagtgaacagaaggaagatgtatgaccagggtggcctttcctcaaagtgtgcctgatgtccctgaaataataggacaaatgcacaccccagtaatctgtcccaacatcattctagaaaacaacacgttcacccattctgttaagtggtgacctcagcattagactttcttcctttgtttctaccctgttgtctgccgctttccaaatggtacaacttgggagtagagataattccaggctcgggagaacttggttatttgcctcgttccttttcattgttgggtctggctctgctgagtttctgtgaggaagagggcagtcagaattgtggagtggagtcccattaggtaaatgctgcagtgctggtttcctttcctcagatgccctcggatggcagggagacctgacaagggaccatgtgtctggccattgcagatgcatcagcttggatgccagatttggtgttcctcagaaatgagcacgggggtggagaggagcttggaaactacagaggattcacaacatctccatgaagggcaacccagagggccccagagcctgtggttctgaggtgcacatgtccatttctggtgctgtgaccaatcccatcacttgggtattgacgtaccctgttttgacgtacagattgtagacatcttcaggagtacttcctgggtaattctaaaacttaacaaatccatcctgtatgagccattaagaaaacctctctatagaaaagcagaaaaagccacattcaatagggattttgaatcttataataattagttggtcttggggaatgaggcaaaactattgctttaaaaacactaactacaagggcccatgaagtggctcagcaggtaaagcatattgctgtgcaagccaggagacctgtgtttgatcctcaggacccatatgaatttggaagaaggaaacagagtccacagagatgttacacatacacacattcatatgtcaatactcacagtaatattgaataactctaaaactcatataataactcatataatgcaaacaacctgtgcatcagcctatagaaagcaactctgctttctgttaggtattttccagtaggcagatggtaaaagatgctagtagagacagagtggaaccttctggatacttgtctcctacatagatactctgtcacgctgcagtttgccgttgttcaggcacatttatttactttcgtgtctacttatcatgtatttaattatttcttcatccatacctgagtctggggggaaataaaatggacatggaataagtatgtagttaatatcacctgtttatagagaaggacactagtattcaaagggttgagagcatttgtcacataaggttgtacgttgtacatgtcctacacgttataaaatgataaccacagctgacctttattaaacatttagtattggccagaattcatacaaaaggccttaagaagaatattttattttatcctgatgtcatcccacaaatgttggtatttttagtgtcttctctttacagaagaggtcatacagccagtttgatggagccaagactcaaactcaagcagtcagactacagaggttgtgcctttcagagcccacagcagtgttccctgcatgcctgcctgctccacacatgggtcaccagccccatgtggctcctaggcaggtgccagatgggtcacttaaattaccagactccctaagtacaaactacacagaatatgctgtggatagtgtgagaaaagagtgtaaaacatctcaacagtaggtctttttcttttcttttcttttcttttcttttcttttcttttcttttcttttctttctttccttttcttttttttctaatatcaacagtatgttaaaataacagcaatttggatagactgagatagattaaaatgaacttattgaaatttagtttcccctgcttctttttgctttctgaagtgaagctatcagacaactttcaattatatgtaaggtttacgttctattgctatcaggtggtgttgcagtatactattccaaatagactgaaacttgcccagactgtggttggtgcccctcggtaacctaggtgaggctttgcttaggatggtggggtgggacgctcctaagtcctctgttatttatgaacttaatccgcattattatcatgcgagggtaaagagaaatcaaaaggatcagataagcaatgtttcccgtgtctctaaggggagctctccttcctgattgtctcctgaccgccatcatccctctcctggcctccatagcttgaagtgtcatactccccccacctctgtgtcatacccccccacctctgtgtcatacccccccacctctgtgtcataccccccccacctctgtgatacctttcaaatgtgtttcctatcacgtgcctttggggcccaacgccatctgtagtgtgacatataattgacaaatgacaaaacccagtccttttgtttgggctgttgttgttgttgttttatacctaatgacatttaccaggcagagattatgtgggtacaaaaggaagaagctgccgggtgtggtggctcacgcctttaatcccagcactcgggaggcagaggtaggcagatctctgggctcgaggccagcctggtctacaaagtgagttccagggcagccagagctacacagagaaaccctgtctcgaaaacaaacaaacaaacaaacaaacaaacaaaacaaaaaacaaaaaaacaaaaaaaaaaaagggaagaagcgctgggaacgtttgtggagatgggaaagccacaagctagagggacatcaccaaagcttggttagaggatttattttaagcatccaccccccccccccccccagcacacacatcatgtgctcttccccctgctcaggacagattttttttttttaaatggtgatttctggtaaaagtcagaaacagaaaagaatgttctgtttgtccaaaataaatgtttgtgttagcaatttacaaaggatattcacttatctacagcagtttggggtagagagaggaaagacgagattgctaatttatgtggttatgaagtagtgaggtcaggttaagagtcctctgaaggccttctctgacccgaactgaggccctcgtcctacactgaggccaagggtggagggacactggcatttggaatggttgtttttccatgctgggtacccctagtctacgctagtgaggggctttatacccccagggtagctggcggttgggactgtggtcgggtataacagagctgggccctgtcacctctcagggccactctgtgttgaccatgtgctcctgtggcctgtttccctttagtggtccagtatagctggaaagctgaccctgggtagaggggctggggcagaggtcacacccactctcctggagccctgtctacccacccttagcactcccctttcctgtggcttctgtggctctcctctattggttgaagttttaaccttcttctcagagttggagcttctctgactaggagtttctaacctgtttccccggggcctagtttgtcctctgacatctgcttaccttgctttttgtctgtctatcaggctcaaattggctttgtatactttccatacccaaaaccatgacacaactccacttgacttgttagttggtaaaccagggggcctggagttcctgtcagcacatcagtgccttgacctcaagtcatcttagaagtcttttaagatatagatattacacagtgggttacagtcaaatcactactcattattgtggaaagacatagacctggaggacaaaacagctttggacaaaggatgtcaggggtgggggtggggggtaagagcaacttcagacaacagagtgcagcaggggtagagtcagatgctggagcactgatgttaacacagcgtctttcctagagtctcctggatcgtcacttaaccccagtcacctccacaataggtgtgtcacttcattttcaagtactactgatacattaacatgggttccagactgatgggctgtataatttcacatggaatcagaactaaagtttttaaagcattaaaaatgggcctttttttatcttggtataaaagtgtgcttggcctctatagaactcagtgagttgatcctttatttcagacaacaaatagaagttctctgaagaaggtataagcacttctgcacattacttattcataatggcttttctcaaacctcccaggttcctaagtcccctagaaattgtctcatgtcccaattattcctttttattctatgcagattgtatgcaaggttcatggtggtggcttcacgaaaattaaattcatagaataaaatttgaactttggcaattgagtaaatagccaaaacaaacacactctgttgaaaaaaaaaaaaagtagacattttcttcttttgaaaagcaagcagtgtctaaataccttaaaagtgaactaaaaagctttcctaaaataaacagctttgcctgggatcctaaattgggaccacatggagatgggagcttacaaatggagtgcaccctggctccacagttctgcctctgctgcttgtgtgcctcgaggagctctgtagcctccggtctcgaaggagccctcgggttttagatcccagtaagaggagaaggaggcagaagaaagaagtggaatgaaaacaaatgtctttcgacccaaagcatctgaacaaccagtctcacttgtggctctgccagactcacccaacgcggatctctccatgccggcttgtggggctgcaccggggaaggccaggtttaaacctcggggtggggttcaaggagtgtaagcaaactgcctaggccagtccctgccttgtggcacgtcaaggagaagctaaacgggcatagataaagattttatccttccttggtttcccctatttaccaagtgctccgagctttgagatcacatgtcctgagtctaaggaatgtagttattgtaatataaaccttgtctattttaaatatctctcattagtaggagatggagtctacaacatccatgttgaagagtgaagggtggcaggcttatttcttcatactagaaatgcatctctctcccacgtgggctcctggtctgccctatcaagtgggcacttacatcaaatgcttgtcttagttgacatcttctgtcccctttacctagcgggcaggttccttgagagtcgaggtgttagggactttgggaagaactgctctgagattcatgagggcaatgagttcaaatactaatctaactagttttaactggcaggggctcataagtgttatcaaaatgtgccaattgttttgagctgatatttcttaaaacctcaactataggactatggtctttagaatgaaagatagtaggatattaatagtggcttcgtgagttgtgctgttcgggaggacgacatagtgaaaaatgcagctgatatgtgttgagtgcttagtagtaagccacggcactaaggtgggcgttttgtataggacatagtgtctggtttgattcccctacaagcatctcattcctgtgttagaccagaggaaactgagacccaactgggagattaaggaatggtatgccatggtagcaggtgtgcttgaatccagtcccaaacatcaggaatcaataatgattcttcctataacaggagttctgttgcctgtgtctccctagctaaagaaaatagtggcttttcataaatataactgaatattagaacatttgtttcttaacagaaattgtgtgtgtgtgagtgtgagagtgtgtgtataagagtgtgagagtgtgtgtgtgagtgtgagagtgtgtgtgagagtgtgtgtgagtgtgagagtgtatgtgagtgtgtgagtgagtgtgtgtgtgagtgtgagagtgtgtgtgagtgtgtgtgtgagtgtgtgtgtgagtgtgtgtgtgtgtgagagtgtgtgtgagagtgtgtgtgagtgtgagaatgtgtgtgtgtgactgtgtgtgtgagtgtgtatgtgagtgtgtgtgagtgtgagagtgtgtgtgtgagagtgtgtgtgtgagagtgtgtgtgtgtgagtgtgagagtgtgtgtgtgtgtgtgagagagtgtgtgagtgtgtgtgtgtgtgtgtgtgtgtcacatcaggggcaaaaatccccaagcattcagagcagaggagattgtcctgagtaaaaccgttagagtccctcaaacacgtctcttcccagtgccctaatgcttctgatgcttcctaatgttacacatggaccatgtccagcctcctcctcaccttccacagctgctctgtggtctctaaaatgagaactcagaggcctctgtgcatttcacttccctctgtcctagctgcaggatgacagcctccatttcttccctaacgtcatctcgaatgtctatagataaggtctctcttgcacctcagctctctctgaagagtctggggtgggaggtggggaacaagagaaaagaaaaaagaagacaaagtcaggccccctttaaaacagttacccggttgctctactctcccggacagtgatgaacaaacgaaagcgtatggtggcttcctaagtgatggatggagacactgcggaacccaagatgggactgaagtgtatttttagtgccagcagcgtgtggcagcgtaagtgaaaactgctggatcccctcccttccactgaatggctcgtattgaagagtctatgccctctccctgccagactctcctcacgaactaccgttttatgaggtgggtgactagctccttggcaccaggctgccccgccacagttctcctttatggctcagcactgaagcccagcttcatggctccacagacagcctcggcatggggcgaggggcactgatggaactctgctggctgcgagcttgtcagggtgttaccaaattgtgaggcaaagcctgccgggcagggatccgtctggacaagctgagccttctggcatgaggcggcaatcagacacgaaagaagtcgggagcgggtgacagaggctgactgcccatctcagagtgtttctgctggtaccttctctccagtgggaagctaaccccctggtcactgacgtatttgggcccccggagggagatagaaactaccagaaactaccagagacaccagttatcctaacaagtcattctgccactgttgctccagagctaatctaaaaaaaaaaaaaaaaaaaaaaaaacggaaaggaaaggaaagccactgggctgcaccaggccccatggcatgcttctgatgtctttcagaatggaaaccatgttggagctgcagactacaaaatgtcagactacaaacttgctaaagggcaagtaagcatattctagaattctcttaagagaagtaacccttgtcctaaggacctcactagagctccacaggatggaacagtgctttgaaacagttgaatcataaagtgacccaaacgtgggagagtgatgagcatcggaggggagaccaggccctgtctttatttgttcctgtttctgaccgtcattgatctctatgatgatggttccaggtggcccagccggaagagaattttgtgtcttggtgtgatgagatcagctctctgagagacatcaccactaccatggaactttaccaacaagggtcatgctttgctgacaattctataggattcattggaatgagaaatggggccagaagggctttcttgtgaaaatgagagagtgcctctctatccagagttcaacctgaaaccaaaagatgtcaccacagctgcagatcccttagctccaaaccttgagtaactttataaacactctcagcagccatgcagggaacactaaattcctcttaagatgcaggagtaacaccctagggtgctctcatagctaacttaatcttacttcattcactgttctaaaacacgtggctgtcatattttagctgttgccattgaaagcccagtgacaagagaacattaacctgggactggagatgcacaagctgaggccccgcccttcgcctactgcacgggaatctgcatttgaccaaacccctgggtacagcccttgtaaaggaaagcaggggcagggactcatgatgcctaagctcactttaattttaattatgcaatcaccacaaaagggctatatggctagaattaatagcttccaaaccagctgagactatttaatagagttctctcgttgtgtccttctagtcattgatgttagcagtgatagtccaagattattataaagaggccaaaccatatatatttggacagggtttctctgtatagccctggctgtcctggaactcactttgtagaccaggctggcctcaaactcagaaatccacctgcctctgcctcctgagtgctgggattaaaggcgtgctccaccactcccggctcatattcttaaaataaggcttagatgtctatctaaaattcactggggcaaattttctttgaatgattagatgaaatgattgttgactttaataaggatgcttcagtcatctggatactatgtggagattcatcttctccagcaaagagagagaaaacaccgcaattggaaacctcactttggatttggctcatggagagtcaaatgacgtcaggatactgtgtaatactatatagacttactctatgaaaagcttagaattcattcagtgcaccagaaaattcatacccaatcaaagctagataaaatttggggatttattggtattggttttttttttatttcacttattgcatattgacagctagcctacattatttaaatggtaacatcctgttggctccttggcaccaggcttccccaccacgattctcctttataactcagcactgatgcccagctacatggctccacagacagcctcggcatgggatgacaccaggaccacagcaactcttacagaagaaaacatttgattggggctggcttacagttccagaggttcagtccagtatcaccatggagggaagcaggcagacatggtgttggagatgtagctgagagttctgtatccagatgtaggcagcaggaaaagagagccactgagtctggcttgggattttgaaaacctcaaaactcacctccaattgttgtggccgccagcagctcgcaacgtgaacggttcgactgatatggctactcgagctgtaagagaggaatttagacggggtgaaagaagaaacggagctaagacaaattcattctgatcaaaggctcaaattttattgttgcgacactagttatgaaggaagggggaggggacccgattctcgccgaataatctctggtccagtatgaaaggtgcacgtgtgtggctccgcaggttccagcagtgggcgtggcagaacgaatgagcaggaagctccacccctgagcaagcaggtttcaggctgggggaggggagactacatccaatggcacactttcctcaacagggaaacgtgccaccttaacgctttccccaccttctaatctgttaaaatagtgccactccctggtgagcaatccatgagcctgtgggggcctttctcatttaagccaccacaccctctattattcaatctagatatttcgttttgtctaagtgttgctacaaagaatacatttaataaatattttaaattgattgaataatgacttctaatatgggtttggttgataggagttaaggagactgaggtaagtagaccaagcagagcctgcagtatcacagcattttggctcatttaacatgtgatgtaacagacctattctaaaaaatataatggatcagaaaggtagcatttggttgcatctgatactactttggaagttattttctagatggtcacaggacagcatctttgacatctacaagtcccccacagtccctgccttactgaatgcatctggattcaatgtcattatgcatggtttgaaaagagtttgtgttctaatagatctacctagttgtaaacatctgttgcgacctaacaagtgctacattcatttaaacggcaccggtgcacagaggtaaatagagccttggcaggctttccataagggaaactgtgtttgcttccttcattaattactaatggagcattaagacatgtgttccctctgagccaagttggataattcctggcacttaattccagggtgctttcaaaagcagagacatgtattgacacagcagagagcatgccctgtaacaagcatggtgctgactaccctgccaagatcatactaagcttcaattttaccaataccaagtgcaccaattcgttggtttaacctttgcagtttggaggttaatttggaaaaacaagcatatatccccagagcacttctgaaagcagctactactgtgtgacttggaaaactctttatgaagatccagaatgaacaagctaagaacagaattacaaatcaaactgtgatttaggagttaatgttcacaagccaattatcaacagaattaaaatgaagatttattcccttggacacatcaactaacatatcatgggagtgataacatgaaaatagtaaccagtaagagactcaccaatacatcttagtcatattagatttttaacatgtagcacaatatgtttaacatatattttaatatagattatgataaaatatgaataagaatatggatgtcagtaatgttgaatagtggctatatttgcttatgagttacataaaatagcttattttagatgttcacatagttatagtggtccacaatagaaataccttcttttgatctgtttgttttcgagacagagtttctctatgttggctgttctagaactctctctctctgtacaacaggctaatctcagattcaaagatctgtctgcctctgcctcccaaacactgagattaaaagcatgcactaccagtgccctgcaaaagtttttttttttttaagttttacttttattttgtacatatgggttttctacctgcatgtatgcttatatgcaaggtacatgcagtgctcatgaaagctagaagagggttttggatactctagtactggagttacaaatggttgtaagccatcatgtgggtgctgatagtcgaaccagggtcctctggaagagctatcttaaccattgagccatttctccatccccaaacatttttttcaaacatataaattttgtagatatccactcgtgttggggagtaatggaatccagtaaaagtgcaaacaaagtaatgctgcatgctggtgatgtctgggtacgagagttagtgctactaatggggggaagtttgttcctcattaaactttaatcaaacataacagagacagcgatggaaaaacacctcagaaagacaccaggcccccccccatgatgatcctacttggatatatttacagccccaaagaaaacaacaggcctatccaaagaggaacaggtttggcccaaaagactaaaccaatgtagtcatggaggacaaggaagctttgcctggctggacttagggaaagtggccagatgggaaggtcatgtttctcatgaatgtggaaggatgaggccatatcccacagatttgactgtagtttcatgtgcaatgatttaaatctttgatttagagtaggaccccgccacggacatcggtgagcaccctgaacatagattaatgcagctatgagggaagaacaccagcctctcaacagagttaaaaaatagaaagtcttcctaagaaagggtctggaaaaaggaagcttcttgaccttgtaaaatgtcagtggtatgagtgaagtagcacatagtaggtataggcacacagtaggtgtggtaaaacagggtatgcatgggaacttctgagtcatgctgtgtctgtgtgtagatgaggctcttagaagtctgttgctgccatggaagaaatgggggcaggcagttattggacaaatggggtgggataatagggtatctatttgaaacacagtaaataacggattaaagggttaatttttccccaaattttaattataaccctgaagaggcaatggttttacaagtctagacagataaaaagaaatcgcaaaggagagttgaaaacaactcagactatgcaaatattaaaaacttatgttagcaaaatattataatagcaaccagaattcgaagtcagacaatgttgggaaatgtttgaggagaatgtgacagacaaaggcctgatatctttatgaaatgaaatgtttgtacaaattgataagagaaacattgtaattctagaagcataaacagacaagtcataaaaaaaaagaagagaaaaccagtaaataaacatatggaagatattggattgatttggcagtcaaatccatttaaatgagcaagaaaaaatatgaaattttatttttatgaaacccagtgctagcgaggatgttgtaaaagtggtactctcatgctttggtgatatttaaattagtacctcctttttggaaagcatttggcagtacaatatcatgagccgtaaaaaatgtttatagcctttgacctagtaatttgacttgcttctgggaacttctcctgaagaaaattaatccaaaatatggaagaaattaaggacctaaaataaattgagaaatgctaagtgtctcacaatagagaatagttaatgtgtcatggtacactgattggatgtaaaacaacgttgtccttcttaaatacagaaatggagcacaggcagataaaaggaaagattcttgtgatttcatatgaaataaagtcataaggtatttacatttttgtgtctgggtgtgcatatgagcgtgggtgcccactaatgccacaggtagttgccactgctgattgtggatgcagggcaccaaactcaggtcctctggaagagcagcacatactcttaatgactgagtgatgattccagccccggtaaagaattatgcagaaaaatatatccagaagaaaacagttggaataaccaaattttgagttcttaagctggggtggtggtatattagtgaggtttttctttaattctcccccccattatattcctctcatctattaaacttctgtgacagttgccctctatgtgtccctcattcccacccaaatccacacccaatttccagagtcctgctcatgtatgtgagcatccagaaacccagtcattcaccagctgtatggaactgtctcatgtccaagctccataatactgtcttagcatttctttctttctttctttttttttttagaatgatacattttttaaattaggtattttcttcatttacatttcaaatgttatcccaaaagtgccccataccctgtcttagcatttctatgtatgtcatacacaattcacattccgaggaaatgactgatgcatattgtgtgtccttttctgtagttaaattccaaacctcaaaaaggcaggattcatttcatatacttcccttgcttgctaagcatggtgctttgcctgctgcatagatatcaatttaaagatgtttcttcccacgctgcagggggagctcacgagggtcttcagcatctgggtccttttggcaacatccccaacatagtggcagagttgactggtgacaacattcctaaggacttcagtgaggatcaaggctacccagaccctccaaatccctgtcctcttgggaaaactggtaaggaatatggccctgggttataacgggaggtaactggaaattctgaccccagctacagtgtgagccctctatgaagaatgttcctctttttattagggtgaggcctctctcttccctgaagcacgggctcccatattgggtggagcaacatgggagttggatatgaccaagccagtatgaggaggctggccctggatgacaggaaatcttgagtcactggctggcatcaaacccatcagtcacctttgacttgcttgtagggttttggatgggtagggaaaaagaccagctcagagtgtgggagtctggaaaagttgataagagaggacagcagttcttaaagtggggtccttgggccagaggcagcagcatagcctggaacttaacataaactagaaatgcagatctttaagttgaatcagacttactgaacgagaaatgctgaagctgggttctagccatctgtgtagtgagcagcctcagagcacactgaagtctgaaatctaccattagaagacaaagggaagacacccaacgtccgagccaagagatctgagttctagggttaatttgtgcagtatgattttacttctttaggtttccatctcgtcatctgtaaaacgatgacacactcaacaccttaaagaaatgtacagtgtgagttctgggctttcctaagcaagacctttggtgacatagtactctgtgcatgcccttgacgctgagaggagagcgcacagtgagctgacagacatgggtgagatcccagccctagactcggcctcagaatttccttttgcctttgctatctatcgtttcatgaagctaacacactccacactgttttcctgcctcaattgacaatctaagaaaagaaatcacttactaaacttagctgctgttggggggaggacttctgaggccaccttaccatgcatgatacagctcagcacggttgaatggtccaagaatggagcgatgacttgcttctgccctggcatgatctcatccaaaccaccccccatctccctgtgcagctccgtgcagctcctgggatctaacatggccacagggttagaaggttacttttagggcacattttcagccctctacaatctctggtgtctcgcagacaggcttcatctccacagcttgatctcagctgacttaaaagtacttgagaaataatgaccaaaatgttgcaaagatgctgcatttggaccaggatgctcagtatccctttctcacataataaaggcattagcaatagctcagtgcgaagtgcggagtcacacaaggagttgtttggaagactaataacttgcacgctagtcttctggggcttagggatgccacactgcatttgaaagcctccagtttagtcctaagagctagacaaccttgctaattgcaaatagatcttctctcattgttgacattgacaggtcattatcccttggcagacaaccgcaccaagacctttgacttggggaccttctttcctatcctgatcttgcacaaatgcttgcaacatttgtttccttttctgcttttccacctcactttacaatgctgggacttgaacctagggtctcacatatgctaaacaggtactcaaccactgagataaatctctttttaaaaaatgtctttctcccttttcaaaaatgttgtctagaatacatcagaagcaggaagttttaataactcacttttaggggaccatacctagctattatagatcttaaagaaaaacaaaagctaaggaagataatctgctttctttggtttgatcagaaaccataatatatacttcaatgaaccattgcagttgggtattatagcatatttctgtaatcctagccctcagaaggcattgacaagagaattgtgagtttgaggccagtctgaggtacagagcaggcacttgctgagagcaatcaaaacaaaagcaaaactaaacaacaacaaaacagatatcttggaacaaacattcatttaaagggaggtggcagagatgggccgtaaacattctgcaaacttctcctgtaacaaaggtatcatgtatgggcattttcattccttagaacaatatctgatttacctagttaaataggtaaataaacagcattggagaagccaggttaactctatgaagctaagcctatagatcctacatattctgggatttggtccttaagtcttgatctgtctcaactctaaaacttaagtcactgctgctgtgatacacagcaccatgacctgtctgcagatatcggaatggtccctaaagacagcattcaaaagaagcagagggactcgggaaacacgtgacagtgaagcagatgaagcagtctagggcagtgcttctcaacctgcggaaggctgtgaccctgttgggctgacccctaaccacacaactatcttcattgctacttcataactgcagtgttgctacgattaaaaattgtaatgtaaatgtctgtgtggcccacaggttgagaaccacggttctcctggttcttcacactagatacttgatttttatttctatgcagtccaatcacagggaggtgaggcaatgacagaggtggagagttctgctgtcttgaatcttgatgcccccagttgccctggctggcagcgtgcatactggcagatggggtagagttggggaagtggaccataataaaaaacttttggggacaggcctggaagtggaatatataactcctgtctgtgttatattggctcaggcatatgactccaaattattgcaaagaaaggccggaaaattagccttgctatgtgccaaggagaaaagggaagtgggtttggagtgcacccaacaggtctttgctagtagaagtagtcccatctaccagggggattgaatcccagagggaatgtgacttagagtatctgatatgaacagactctgccccttgtatgtatagatgttttaataaattaacatttagagtaacaacagatgctttgaccatttctcaaaaacctctgtctacagctgatgatggatgtctagaaaacgcccccgacactgcagagttcagccgagaattccagttagaccagcacctttttgatccagaacatgactacccaggtttgggcaagtgggtaagtcaatttacagtggatggtagagttttcactcagatctcgtgggaatagtaatgctggagacaaacaccatgcatggagggaaggaaggaagaaaagttgtttaggagttgattcctcagaaatctccggtgagggaaacactatgcaattatcattccagaccacacttgtgtctatacagcagtatactgatcccatcgaaagatccagcacatccagaccatacactccctagaggcttctcttctgctctattccccagactgaatcataccattcccatgcctcactagtacttcatgccactcgaccccatgagaagggaaagagtttttcaaaagaaaagatactgagaaatttgtaaagttgatctctagactatgggagatggatgatccatacattatctctgtagaatcaaggaaataaagacatccagacttgtaaagagacacacataagtcttctttgtggaaagagggacaatctccagatgtgtggcagtgagcttgctgttggtcgcatgcaactatgagtagctgtcaatgaagggtgttgttttataagcacttggaaagagaaatcatggccacttggcactggtgtgctaaaaacaagttttgtcgatctgctcatgttattccattgccagcattatgtgtgccagcttaatgaggggaatgaaggaggcatggcgcacttggatttcatctaagtatttgacaagatcttttatgatctcccattggaagaggtgaagacacacgtccaagtcaacagaataccaccaaaagacagcttgttaaagaatctgtgtctggaggggagggagatggtacagggaaccctgcatgtctgaatgctaccccacttcacatgtgtatcaatgtttgtaataaaagtacagatcgcacacttctcagattctcagtggatgacacaaagttggaagggagagctctggatgacagagttgggattcaagaagatcccaacaggctggaacaatgagccaaggaagattacaattgaatgggaatgtgtctaggtgcctgtggtcgggcctatgtaatccaatgatgaagtcatgtgagaaaaacacagggaaacgatgagcagcgttaattcacatatgagagcagatgtcaatgcatctgtgggacgaatgaacggggagtgttccaaacaaagacgacagtccaggtaacttaagcccctccggcttcgccagtcctttataggttagtgctaactgcagctttggtaannnnnnnnnnnnnnnnnnnnnnnnnnnnnnnnnnnnnnnnnnnnnnnnnnnnnnnnnnnnnnnnnnnnnnnnnnnnnnnnnnnnnnnnnnnnnnnnnnnnnnnnnnnnnnnnnnnnnnnnnnnnnnnnnnnnnnnnnnnnnnnnnnnnnnnnnnnnnnnnnnnnnnnnnnnnnnnnnnnnnnnnnnnnnnnnnnnnnnnnnnnnnnnnnnnnnnnnnnnnnnnnnnnnnnnnnnnnnnnnnnnnnnnnnnnnnnnnnnnnnnnnnnnnnnnnnnnnnnnnnnnnnnnnnnnnnnnnnnnnnnnnnnnnnnnnnnnnnnnnnnnnnnnnnnnnnnnnnnnnnnnnnnnnnnnnnnnnnnnnnnnnnnnnnnnnnnnnnnnnnnnnnnnnnnnnnnnnnnnnnnnnnnnnnnnnnnnnnnnnnnnnnnnnnnnnnnnnnnnnnnnnnnnnnnnnnnnnnnnnnnnnnnnnnnnnnnnnnnnnnnnnnnnnnnnnnnnnnnnnnnnnnnnnnnnnnnnnnnnnnnnnnnnnnnnnnnnnnnnnnnnnnnnnnnnnnnnnnnnnnnnnnnnnnnnnnnnnnnnnnnnnnnnnnnnnnnnnnnnnnnnnnnnnnnnnnnnnnnnnnnnnnnnnnnnnnnnnnnnnnnnnnnnnnnnnnnnnnnnnnnnnnnnnnnnnnnnnnnnnnnnnnnnnnnnnnnnnnnnnnnnnnnnnnnnnnnnnnnnnnnnnnnnnnnnnnnnnnnnnnnnnnnnnnnnnnnnnnnnnnnnnnnnnnnnnnnnnnnnnnnnnnnnnnnnnnnnnnnnnnnnnnnnnnnnnnnnnnnnnnnnnnnnnnnnnnnnnnnnnnnnnnnnnnnnnnnnnnnnnnnnnnnnnnnnnnnnnnnnnnnnnnnnnnnnnnnnnnnnnnnnnnnnnnnnnnnnnnnnnnnnnnnnnnnnnnnnnnnnnnnnnnnnnnnnnnnnnnnnnnnnnnnnnnnnnnnnnnnnnnnnnnnnnnnnnnnnnnnnnnnnnnnnnnnnnnnnnnnnnnnnnnnnnnnnnnnnnnnnnnnnnnnnnnnnnnnnnnnnnnnnnnnnnnnnnnnnnnnnnnnnnnnnnnnnnnnnnnnnnnnnnnnnnnnnnnnnnnnnnnnnnnnnnnnnnnnnnnnnnnnnnnnnnnnnnnnnnnnnnnnnnnnnnnnnnnnnnnnnnnnnnnnnnnnnnnnnnnnnnnnnnnnnnnnnnnnnnnnnnnnnnnnnnnnnnnnnnnnnnnnnnnnnnnnnnnnnnnnnnnnnnnnnnnnnnnnnnnnnnnnnnnnnnnnnnnnnnnnnnnnnnnnnnnnnnnnnnnnnnnnnnnnnnnnnnnnnnnnnnnnnnnnnnnnnnnnnnnnnnnnnnnnnnnnnnnnnnnnnnnnnnnnnnnnnnnnnnnnnnnnnnnnnnnnnnnnnnnnnnnnnnnnnnnnnnnnnnnnnnnnnnnnnnnnnnnnnnnnnnnnnnnnnnnnnnnnnnnnnnnnnnnnnnnnnnnnnnnnnnnnnnnnnnnnnnnnnnnnnnnnnnnnnnnnnnnnnnnnnnnnnnnnnnnnnnnnnnnnnnnnnnnnnnnnnnnnnnnnnnnnnnnnnnnnnnnnnnnnnnnnnnnnnnnnnnnnnnnnnnnnnnnnnnnnnnnnnnnnnnnnnnnnnnnnnnnnnnnnnnnnnnnnnnnnnnnnnnnnnnnnnnnnnnnnnnnnnnnnnnnnnnnnnnnnnnnnnnnnnnnnnnnnnnnnnnnnnnnnnnnnnnnnnnnnnnnnnnnnnnnnnnnnnnnnnnnnnnnnnnnnnnnnnnnnnnnnnnnnnnnnnnnnnnnnnnnnnnnnnnnnnnnnnnnnnnnnnnnnnnnnnnnnnnnnnnnnnnnnnnnnnnnnnnnnnnnnnnnnnnnnnnnnnnnnnnnnnnnnnnnnnnnnnnnnnnnnnnnnnnnnnnnnnnnnnnnnnnnnnnnnnnnnnnnnnnnnnnnnnnnnnnnnnnnnnnnnnnnnnnnnnnnnnnnnnnnnnnnnnnnnnnnnnnnnnnnnnnnnnnnnnnnnnnnnnnnnnnnnnnnnnnnnnnnnnnnnnnnnnnnnnnnnnnnnnnnnnnnnnnnnnnnnnnnnnnnnnnnnnnnnnnnnnnnnnnnnnnnnnnnnnnnnnnnnnnnnnnnnnnnnnnnnnnnnnnnnnnnnnnnnnnnnnnnnnnnnnnnnnnnnnnnnnnnnnnnnnnnnnnnnnnnnnnnnnnnnnnnnnnnnnnnnnnnnnnnnnnnnnnnnnnnnnagaaaagaaaagaaagcatgaagatataataagccccaatttccacagatacaatgcccgttctggcagtacagtgaaggctgggtcccagtgctaggaaagatggaagtcaaaggcagaggaagatgtgaggccggtgggcctgattgtgacttaactgcagaggaagatgaggcactgtggagaatcagtactgaagacttaggggacagacacagctaaatggaggctggacctggaaacaagaggaaaagaaatggaggaaatctgagtgtgggcagagcccatctggggttgtgatagggtggacgaggtgctagcttcttttctcagcattttggtgttttgtttggtgttttgtttgtttgtaggcagggcctatctacagtcctggctgtcctggaactcattctgtagaccaagctagcctcaatctcaactcacaaagctcccattgcctctgcctcacgggtgctgggattaaaggtgcacagtgctatatcctcttcttcaaaagctcactctccccaatcccacccacacccactttaggaacacttccctctccgttccctctcccttctcagaactccttgggtttctcccaatcacccagattcattgtccacatcagagccgaagactagaatttaagaccaagaataaaaagtgctatcacatatcaatggcaaaggaatgacatttagcctcttatcagctctaatgatgtgtttgtttaaacatcagtttccttgtttattttctcattaccacccagcaataaaaccctgtttgcttgatcttcgcatgtaagtgttaactgagtgtctattgcttttttaagccgggatccacaaagcagcctgagtgtttatatagaaggatagtctcaagcgtgtctgcaactcaactaccctttcaacttgcaaaacagtcatctctcaaataaatggcacacaagtccccctgcttccttgacagcactgcctccctgttttttatattatctggagctgagttgcaactttagcaatgatttccacattacaaatatcagtgtgtctgtcttatttcctgcacagctctttccttgttactgaaccaagacacgtttattaaatatacaccatatgaccgaccgctgggccctgtggcagggtaacgggaagacaccaatacttgttatataataagaaattctaatatttatagcgctcactacagtcagatactgtgctaatattttacttcaatcattttatccaggctgcccaccctcatcactgtcattgtataaaggagaaaatgcagggcaggggtctgggtagcctgctcagcaacacagagcttgtgattgacagagctaggaactgaactccatctttacaaacacacacacacacacacacacacacacacacacacacacacactctttatgtctcatccctcatatgtagcctacagagttctatcttaggactgattgctttcaacacagtgtatgtaactgactagagtcctgaaggtctatgactaaaggctgatataagcctcctcacattcacttacaatcctcacggcctatggccaaaggctgatgccagcctttacccttaatgcacattcccagtgcgtcaaaacccaaatgtccctccttttccagcgccttgtacagcttccatcaatagctgatcaaagcctgagctgagccatgggaggcaggagtgtggtcagtccctctccgactttgtttatcttacatggccatgccacgtttgaatatgggactctccaattctgctttgtcttggtttctatatcactagacttgagctatgtattttgtcttcttttacttgacacatactaattgtacaaatttatggagtagaatgtggtatgtttatacatgtcaatgcacgtacctacacgtcatgtgtgatgttcagatctgggtcagtggcatattcataacctcatactgtattcatttcttttttaaaaaaattgttctttaactttatgcagatgggtgctatgtccccatgtgtgcctgtgcttcgtgtaagtgcagtatgcacagaggccagaagagagcactgggttccctggactggagttagagatagttgtgagctgccatatgggtgctggcgactggaatgtgggtcttctggaagagcagccaatgttcttaactactgagccatctctccagccccttagttcttttctccgtgttgaaatattcaaacactgggcagtggtggcgcacgcctttaatcccagcacttgggaggcagagacaggcggatttctgagttcgaggccagcctgctctacaaagtgagttccaggacagccaggactatacagagaaaccctgtctcgaaaaaccaaaaagaaagaaagaaagaaagaaagaaagaaagaaagaaagaaagaaagaaagaaagaaagaaagattgattcagagtacccaccactgttctaaaacatacagcttattaaaacggttattcagcagctgtggtaaagcgcactgacactcattccttcttaactgtgcatgacctgtattgtcactatgctttctccatctccttcaccatccccagctctgggagtcactgtttttttctctgttagcatgagatcagctttttaacaatcataacttcttcataatcatgctatttatgggtatctttagcactttgcatcatggggcacatggtgtcagtttgttacctgttagtagcagtttcattctctttagtaaagtggtgtctatgtttctctggtataaaactatcatttccatttgaaattaacctatgggaagctactttgagactataaatatcctgatctccatgaggctgttaaccaatgcattttgcattcattgacggtaattaccagactcaattataaccacagtagttgcagaatggtgagcttcttgctttcttcttttccatctgcatcctacccccaccccccaccctgggcagagcctccactacttcctttcctgtttgtaaacatgctcatttatttggtacctctatagattcattgttactaattttgttcaacatgtcctgcatttggccaataggaatttcttcaagctggcattttcttcctttggatacaactctagcacttagttgagtaaccttactttctggctcaatcagttagttagcaccattaatgtttgtacttcctatagcctagacctatgatcagacagttctccatgaagatgtcaatctcccagggtcctttaggaatggaactggtcatccaaaatcttgatggcccagtggaaagccctttggtgaacttaaaccagttgcttttctagaaattaggccactcctccccaaggaactaacaaatgagtgtcagaagaggtagctgatttattttaattcattttgtgtaccttttttccccttcacatcccaacccctgctaccaaaacccacactgatacagagctgatagagaagacccaggcatgttcaggggtaggggcatggacatgttggtcctgacctctgctctccaggaaagcaggaaccatctttgagaggaagatttctagaccttgtatacttcttctagttataattttccccaagaagctctaaggggattggagatgctaccgccttcaccccatttgcagcatgctggagctgtgccaagtctgatgagcaatgggctctcactgcaccagcttgctagaccctctgccctccctccagttcagacagctggagagagtgataggtatgagtagtcactatcctcgccctcttaaccccaacctccttcccaactctggcctgagcacccagaacattctgtgtgcattagaattgtttacagtcagacactgaggttgagagcaactacaatattctcattcctcaagggaacggccatgagacctgccttttctccctcctgagagttacttgagccatccccggaagtgagccagagataggggctctggccaatgctggtgtttctggcaatgggcatgcttctcctggcaccaccatgcccctggaaatttgaggttgggcagagctattcattgtaaattgcaggtggtaggttttaatgaacaagaaaaccacgaagctcattcttggcatctgtcattttcactttcaaatctaccatttaaatatttgttaataaccagacagctcagaggatacaaatgttgcataaacttgctcctcaccagaactctgtcagctcctttttctagaagttagtgttagggtattgtagcaagatgaatcgtcttctgtacactagtttccttatgattagaaaaatcaaataaaacaacacaagcaaaacacccaaacctctttctttggttttacattcaggttaagtgttctgtcttttataatctcaactggagagaaatgtgttgagcatgtgtctgatagtcttgagctcattgaaatccagcgtgtgtttgagacacatccgtatgtgggaacacttatacaaactgtgctaacagaacaacacccccacacccccaccccgacacacacaacataactttcctttctgccaagaagttttttggcagtttttaaaaggttcactctattaaaaatgttatagaccaaatggttctgtgattgccttgacggggccactaacttgagccacaggagagatggctgcagaagtcaatgtctcatttatttacacagaggattgttggtaatggtcagacactgctccagagaacagtcatgtgtgcagttcataaaaagggaattagatactgagataacgttatttattttatacaaaggccattcaaagtgaggagccgagtttcccgcaccctggtattttagcatgccatctctccctgcttatgagattgttggtggcactgtgtgccccgaggcagtgcagaggactttgtgaaaagcagtgcagtcaccagcttttctcttgtggtctatcattctgacacgacattcctttcatctagctttgtttccaaaatatgtgtatgcaaataaccagaggacacaccaagtgctgctttaaaatagacagttaccaaattcaatccatacttctacatttgtgttttcttttctctctgctctagaacaagaaactcctttatgagaaaatgaagggaggacagaggcggaagcggagggtaagtcacaaggggacctgggtgtttctgggatgtttagtgtttctgagaggagcaactgaaacatttggttttggggaagcagcagaatcttttctgatgcaattgcaaagaatagaacagaagtcgtgtatggcaagggccacacccagaatatatacccttggtttctgggctggtctcctccctgggctttaggagtggtccatggaaatcacgcaacactcattacttcctttctggccagcttccatgaagagcaatttcaacaggtagaagggactcctatccacgcaggggaggagtgtgcagggaagctatttgggcacgactttcctcaagtattctgtaagccagtggaggaaatggctcacacatctgtatccattatgcaaatcacaagacagcaaccaggaagtgtgaaagtgtatactgcaggccataattttgaatttcttctatatattttttttatattatcccagccaagctagagtagcatgcatttgccttatctcacttgctgactgccttgtctggtacagcctcagttagttctcattggaggattgttcaagatgaatctttggcatctgcattgtgcattttgctacaacatatatagtgttgcctggtataaatctgaatgtcaagattacattgggtttccagtgcatgtttatagacctcgggcttaacagtgatcaatacccaccctgctaatctactggtacattcttcatccaaccaaacaggaggggtaaaaactttgctattgcatagtaaagtactaccatagtaactgttttagttaaaatatacaaaccaacacaaggtcgctgacaatttctttggaatagcaagtacctggatcttggaaaaaattgggaatctaattagtgacaattttggcccatctgaagagcttggccaagtacaatcagcaaatgttttaagtgtggggtttctggctttggtattaatcataaggcccctgggttgcttgacaaacacagatccacaggcgatttcctatgcaagaagcagaaagctgttccatctggaagcagatcttctttgggagaatgaacggggttattagggtttttcttggtgattacagcctccaatggcagatggtgacaggaagggtgtaatgcgttcttgagagaacatcaagaaattctattctaggagctcagaatacacataatttaccaggaagatggcttgaatatctccccatggtacaacaaggacatttccaaataagaccaatgactgaccccagatgaataacttagcatgcagctctaattgtctctacttgccggttcaccacgccttctgccaggactctgaggggcttaggttgactttaggccacatttccatgagactagtaattaccaaaattcaaaattctggcaaaggcatatgtcataaaggatttctacttttatatccatttcttccacatagacaaggcttaaaatttaagggaagaagggtccctgtgaccctggggtatcagttctcagatatctacaaagcccattctcattcctttagccctgggctgttctagactgatgggcaaacagagcttaacctttcacagccctgcacctcggctgccgttcccttcttgattgaagaccttagccaccttctctggagcatgaatcaatataaagaaatcatagctcaggtatttgaagaattaaggattactctgatgaagctcaccatctactgaggatttgaagaggacagcaagcaagggtccatcccaagctgtccttccagttgtcagatgaataatgaccacatgtaaattacccaataacgactatacatagataagtattgtgggttctttggaacacacttaaacaaagcacttaattcataattgaatatcaatccaaaacaaaagaggtttgactctggtgtctccctcttccccattcctcacaacctttgaaatgttctgggactagacagcctgtcttgcaagacggaagtttcttagcaaggggacggatccctaaagttgcagccaaaaccccaggtcattttctgtggcttttatagtcattccaggtcatttgcttcacatataaaagatcaatatacttttaagcgattttgaggatattttaactctgtagctggtatcttgataccatctaaaagccactcgttatcttaaacagtttatcagctacttagtcccaagttgacaaatatgaatatctcatattctcttttaacatgcgagaattttaagaaattaatactgttataaaactttttcttattttttaaaaaagttgtttattatatgtacagtattctgcctacatgccagaagagggcaccagatctcattatagacggttataagctaccatgtggttgctgggaagggaacttgggatctctgagccatctctccggctccaaacatattttctctaagtacattaaatctgcctgctcagaggttgttaggatgggccacacgacactagttgacaagttacaaaagagcactattttgaataatttgaggaggaatacctttttgtgacgtgcctctttccaaatacgtagacactgttcactgtgtagtcctttgtgagctacctttgcagagtggctgaggtgcttcctgagtcacacgttcatacaccaggacgtgaagaacactgacaagggttcttgtgctccatcccctgtcttttggaacacgtgctgatcaccttttaaagagtcacgcaggccaggcccacgtgaggactgtggtgtctgtttgcttgtgggcacttagcacttctgtaggattgcccctcctttgcttagcactgcggtaggattgcccctcctttgcagcttcagcctatttcttatatttctgttccgttgctggaaggcaacttcaataaacagctaccttccaaaacgctcaaaatatttcctgctcaacaaagattatggtgcaaagctctggttaccagttcaaatccaaacctcaaaaaaagaaaaaaaattgatattattagagaaggaatggaaactctttgactcattcagaacatcaacagatgaacgagaaacacaaaggccatttctggatggctttgtattttatctcaccttttgggatagaatgagggacagttggaatcaatcgctggagccgttaatgaacagttcagcagaattcttgcagagaagagtctcggccatgggatgacctaacagccagtcttagaatactaattcctacctggttcagtttgtcttttttttttttttttgaaattgctttatgtaagaataatgctcactcccagcatagaaaaatcatttttgttttcacgtgagacttggtgactaggttaatagtaagagtcttttccagctcaccccaaacttttaagctaaatataacaataaaaagattgcattgcatttgatcaagaacactacagttatatggaagacagtattagtaacatctgtcagtgagactgtgtactgcgctatggggcactgagagactaaccagctcactggagccatcacttggtaggtgggtggtaagtgtaagtgctgtgttattttcctgttaatccaacggccagaaaacaattctcattcacttatccaaaggctctgtatctgaggttctcatgcaatgccaaaacatatgtcttttttttttccagagtgtcaatccctatctacaaggaaagaggttggacaatgttgtggcaaagaaatctgtcccccacttctcagaagaggagaaggaagcagaataaagagaagacagtatgtagaaacccatccaatgcttatgtgcatgttcatagagcccgtgagtgacagcatgcattttacatatttatggatgaaaagcagctgtccttgcctccataccaatgcctgtgctttctgctacattagaataaaagctccttctctttgggggatttttttgatgtggatctgcaagaaacattacaattaaaatgtatatgtcaagtataataaaaacacggatatgaaatactcagatttcttgcagttttgggttatgctgtttgggccaagtctgtaaaacgctagcatttgattttgattatgtagtgtatctagcccttgggccttgttacacaccaataaagaagtttgtactcaagcagagggggtgacacatctcactctgctgcttcttaataaatgtatgtgcgagca

SEQ ID NO: 432 - DNA, 1153 bp, Mus Musculus
cgcaggagctatccagcacgtcagctccctgttttggcccagattgcaagaagctcgcctgcggccacacggttaaaaatggcctcaaggctggtctctgctatgctatctggccttttgttttggttgatgtttgagtggaatccagcattcgcttatagtccacggacccctgaccgggtctcagagacagacatccagaggctgcttcatggggttatggagcagctgggcattgccaggccacgcgtggagtacccggctcaccaggccatgaatcttgttgggccacagagcatcgaagggggagctcacgagggtcttcagcatctgggtccttttggcaacatccccaacatagtggcagagttgactggtgacaacattcctaaggacttcagtgaggatcaaggctacccagaccctccaaatccctgtcctcttgggaaaactgctgatgatggatgtctagaaaacgcccccgacactgcagagttcagccgagaattccagttagaccagcacctttttgatccagaacatgactacccaggtttgggcaagtggaacaagaaactcctttatgagaaaatgaagggaggacagaggcggaagcggaggagtgtcaatccctatctacaaggaaagaggttggacaatgttgtggcaaagaaatctgtcccccacttctcagaagaggagaaggaagcagaataaagagaagacagtatgtagaaacccatccaatgcttatgtgcatgttcatagagcccgtgagtgacagcatgcattttacatatttatggatgaaaagcagctgtccttgcctccataccaatgcctgtgctttctgctacattagaataaaagctccttctctttgggggatttttttgatgtggatctgcaagaaacattacaattaaaatgtatatgtcaagtataataaaaacacggatatgaaatactcagatttcttgcagttttgggttatgctgtttgggccaagtctgtaaaacgctagcatttgattttgattatgtagtgtatctagcccttgggccttgttacacaccaataaagaagtttgtactcaagcagagggggtgacacatctcactctgctgcttcttaataaatgtatgtgcgagca

SEQ ID NO: 433 - protein, 212 aa, Mus Musculus
MASRLVSAMLSGLLFWLMFEWNPAFAYSPRTPDRVSETDIQRLLHGVMEQLGIARPRVEYPAHQAMNLVGPQSIEGGAHEGLQHLGPFGNIPNIVAELTGDNIPKDFSEDQGYPDPPNPCPLGKTADDGCLENAPDTAEFSREFQLDQHLFDPEHDYPGLGKWNKKLLYEKMKGGQRRKRRSVNPYLQGKRLDNVVAKKSVPHFSEEEKEAE

SEQ ID NO: 434 - DNA, 4290 bp, Mus Musculus
  misc_feature (1)...(4290): n = A,T,C or G
gaggtggcagtgaaggactagtggtaacaacacctaccttttcctatgtgctgaccctaaccagattataggactctgctcatgactagctataaactctaccagtaatacttgcacccagcggaccctttctgggtttcctactcctactttgcagtttcttttgctggattctcttcccatcaaggccatcctggcccttctagtcccacccactagaccatttccagtgaaactggaatgacgcctgtgcttactgcccaccttgaggctctcatccgtgcctcaggcccacatactcacatgcaaacctgtggtagtgaataaggatggcccctggtaggctcatacacttgaatgcttagtcaccagcagtggcactatttgaaaaggattaggaactgtggccttatcagaggaggtgtgtcactgagggtgggctttgaggtttcaaaagcccccacccctcccaggttcaatgtcnnnnnnnnnnnnnnnnnnnnacctgtgaggtggcagtgaggcctgtgagatgacagtaagacctgtgaggtggcactgagagtctgtgaggaggcagcgaggcctgtgatgtgacagtgaggcctgtgaggtggcagtaaggcctaagaggtggcagtgaaggactagtggtaacaacgcctaccttttcctatgtgctgaccctaaccagattataggactctgctcatgattagctatgaactctaccagtaatactggcactcagcggaccctttctgggtttcctactcctactttgcagtttcttttgctggattctcttcccatcaaggccatcctggcccttctagtcccacccactagaccatttccagtgaaactggaatgacgcctgtgcttactgcccaccttgaggctctcatccgtgcctcaggcccacatactcacatgcaaacctgtggtagtgaataaggatggcccctggtaggctcatacacttgaatgcttagtcaccagcagtggcactatttgaaaaggattaggaggtgtggccttatcagaggaggtgtgtcactgagggtgggctttgaggtttcaaaagcccccatccccccaggttcaatgtcacttggactgcctacagaccaggatgtagctctctgctacttctctagctccatgtgttcttccatgcccccacccccatggtgacatgaataaagcctcagaaactgtaagccagcccctagttaagtgctttctttcatagagttgccttggtcacggtgcaacagaacagtggctaagataaaatctgtagctctgtgcctacacatccactctgcaccctcataagcatcataagcaactcacgatgcccacacaaaacctaaatcttcccacgcctcttcctcttcttctggtattatccatctcaggatatagcatcctcgggtaccgcaggttacatgtctggaaagcatcctatggtcttgatgcaaatccagctttcacaacaaagggaataagagagttcctgaaccaaatatgagcgactgtgacttgggaacacagactcaagctgctctgaaaaacatgtcattacagatgccttaaagccttgaaggccaccgaggatggacctctccctggtggagtcttcctgtgtggagacaggatccattccaaaggtaagaacattacatacgattgtctccaccctcccttaagagttcatccagttgggcctgtcaatcaagggctgatccccggcagccaagcttagctagggaagagtaggtatccccttaatgggatgagacacgggcacgttcccttcatgaaaccctcagtgcagtcgtcctggagctgcagccactcagctctnnnnnnnnnnnnnnnnnnnnttgatgcaaatccagctttcacaacaaagggaataagagagttcctgaaccaaaatatgagcgactgtgacttgggaacacagactcaagctgctctgaaaaacatgtcattacagatgccttaaagccttgaaggccaccgaggatggacctctccctggtggagtcttcctgtgtggagacaggatccattccaaaggtaagaacattacatatgattgtctccaccctcccttaagagttcatccagttgggcctgtcaatcaaggctgatccccggcagccaagcttagctaggaagagtaggtatccccttaatgggatgagacacggcacgttcccttcatgaaaccctcagtgcagtcgtcctggagctgcagccactcagctctcagctctcctcagctttccctttttcttcttttctctctctctttctcggatattggccaaagtctaaacatgttgtctctggaactttgggtgtctcatcttttctctgaagttacctgccctttgccatgtacttgtttgctgaccttcatggctaaacatcctgccctaactcaaaaggctgtctccccagcacctcctactccccaccccgacctctgcccccatgccccacctcacccctcaccctccacatccctcctctgggcagctgttcagatccacagcttgcctgccctgttgttttctctcaaatgaaactgtcctccagtttcttttgaaaattcttttattaagaagagagaagtgctcagaaaaaaagaaccccaatttctcagtaaaatgtggtgcccgatgtggtgttcttcaaagctcctggtgacagtgttccctagagaacaagttccatgggctctcagtcacagaatgaaaggaaagtcataaatcaatgtgcttagcaaacatgctggcagtgaccacacgacagagcaggaacaggctggcagtgaccacacagcagagcaggaaactctgctgggaggtttcaggcgctatctgatgccatgcttaacttctggatttgtaaggggctctgctatgaatacctttcaaaggctttacccaatggccaaaaagatgttaggttaaacacagggatgggcaatgaatagcccaagataatctctctctggatctgcaacattctaactctctacaatcatgtagttcttaccagtctttgagccttgtagaatctccaacacagattgggggtggtggtgttttgttttgttttgtttaattccctggcaatttcagtgtatgctcagcatcttacccttagcacacatgcagccaggtatttgaatctgccacctccaacaagatgcacttgtaagacatctgctcctccccagcctgccaaggtgctccatcccgcacccctcccccactctccacctcactctctacttacaccagtttaaaattagttaggaacttcactacttggaacttccatcctttcctgtccattggtgtggcccaggagtctatgtgctccacccaggaaaccccccaagaacgacagaagctgcaccccacctgccccggttcactataactaacaaaaatcctacagctttgaatgtgaattggggccctacctaggggtgtgacaggctctatggggtctttgatgagtcttaaaaacttgaaactctcccctctatttctttgttctccacttctttgctctctcactgtgaccataattttagtttctggactgtttgtaactgacctatgctcaaacgattcagaaagcagcatcaggttttccaggtggagtcacaacaggatgccatggctgctcaaatgctagaaaaatcctcagaaacggagggcgccggggtctgttcaccttgtgttagcagtgggcaagagacaggtcaaggtgcagctgctggatgctgggagctctctaatatacacgccatccaagctcctcccacacaagcctctctctaatgtagcatgctgcgcagttcctctccacacatgcttctccctaatatgacgtaatgttagctcctcctccctgcagagagctaccaccacatgctctactcgatctacggagcacagcaaggtcctggacccacaaggtggcttctgcagagagctgggtaaatcagatgccccaaatctatctttctgacgattttaaatgagtacagcacacaccagtcattaggactaaaattcatcacgctcactgaagctgctgcgtccgttcccacctggagaagcagaagtcagtggaggcttggcaggaaagcagtgccaatgttcaccaacaagatcgaaagagaacctaatgctgactgctaaggaaataggaaaatgcaaaccgaaccaaaaataataaaaactggaattaaaa

SEQ ID NO: 435 - DNA, 445 bp, Mus Musculus
gaggtggcagtgaaggactagtgatgccttaaagccttgaaggccaccgaggatggacctctccctggtggagtcttcctgtgtggagacaggatccattccaaagagagctaccaccacatgctctactcgatctacggagcacagcaaggtcctggacccacaaggtggcttctgcagagagctgggtaaatcagatgccccaaatctatctttctgacgattttaaatgagtacagcacacaccagtcattaggactaaaattcatcacgctcactgaagctgctgcgtccgttcccacctggagaagcagaagtcagtggaggcttggcaggaaagcagtgccaatgttcaccaacaagatcgaaagagaacctaatgctgactgctaaggaaataggaaaatgcaaaccgaaccaaaaataataaaaactggaattaaaa

SEQ ID NO: 436 - protein, 55 aa, Mus Musculus
MDLSLVESSCVETGSIPKRATTTCSTRSTEHSKVLDPQGGFCRELGKSDAPNLSF

SEQ ID NO: 437 - DNA, 2992 bp, Mus Musculus
gctgtaaccgctggaggcttctgctgacggcgtcggacctgcggagcccaggatggtgttgctcgagagcgagcaggtaccggcggcctcggagggcccgggactcgagcgagtggggtcagctcgggtcgcggttctccctttgcgggcgggccggggccgtgaggcggcggggcgaggagcggaggctgcctaacggggcgtgttgtgttgcagttcctgacggagctgaccaggctcttccagaagtgccgctcgtcgggcagcgtgttcatcaccctcaagaaatgtaagctatctccggggccgcgcagggacgcctgggaggggacagcccggcccccggcctgtccgcgccggccacctcccgggctcgtggccggtgcggcgccggccacccactcaccgtgacagtggggccccaagtgtgtccgacgccccgctgtcaggcagcccggcccgcgctccgttagtgaggtagaatatgcctcggggtcccagtgtttaccgagcgagtcgttgctcctagttttggccgtatcctgagtgatggcggtgtcgtgactatatgggagtgatggcggacccttccttacgatcatcactttggacccagaagcaacgcctgtggtggtgtttacctgggtggactttttttttttttttttttaaacacagatgacggtcgcaccaaacctatcccgaggaagagttctgtggagggcctcgagcctgcagaaaacaagtgtctgttgagagccacggatgggaaaaggaagatcagcaccgtggtgagctggaggcctttcttaaggctctgctttcttttgagttggcctggccgactcagaaaaagtcagttttctctcaagtagccaaggtacaggagcaacctatctcagtgctagctaggagaacacgttaaaaaaaaattaaaatagtgtcttgcagtctactcaggctgactttgaacttgtgatttaggaagctcacaccaggcgcttcagcccgtgctggtgtcacaggagtgtctcatcaactgagacagatgacagtgatggtttttgtgaagttggagatgtgacccaagccagggtcttcatcccgctaagtcatcgctctgggttgagcctcatccccaccccaagggaggagggggaggggcatgtcaggattaggtccgggtcccccttccctgtcattttggcctgtcactcccaggctgttgtgggatcaggatctacttctgcctctttttggtggagggggtgggttgtttggttgggataaggtctcgggtatctgaggttccttaggtcgcctctgtctccaacgtggtggaatcctaggtgtgcactaccttcccagttactggttttttttttttgtttgtttggttttgtttttcgagacagggtttctctgtgtagccctggctgtcctggaactcactttgtagaccaggctgacctcgaactcagaaatccgcctgcctctgcctcccaactgctgggattaaaggcgtgcgccaccacgcccggctctgtatagggttgttttttgttttaccttaaatttaaagactgtggtaccggacgatcgtcccagctttgtctcacagttgctgggtttggggttatcagagtgggtttgtctgagggattttagagaggtgaatagtttggtgggagcccacttctgccttcccatcctgctgcagatgtcatatggaagaaggcacagagctgctttgcttgttcttgagagcaggttagggtggttagacagccgtgagtacactgggaccctggaagttgggaattagtatttaaagattagttgtctttttgaaacagggtctctgtgtggtcttgcaactcgctatatagaccaggctggcttagaacttacagagatctgtctgctcctctctccagagtgctgaggtccaaaggtgttcgtgggctaccatgcctggcctaggtgttgtcttgatgaacattttggcttttcttgggtgaataggtggtgtctatatctataaaaagagatggtctttttccctttgcaggtgagctccaaagaagtgaacaagtttcagatggtaagttccattccctgctctccagtcctccttgagggcgtggtgccacccaagatggagcttgaccgtttgcccgcactttcattttatgaatattgttcagcagtggtttcctttccctcctgcctaccttatttttattttttccttttttctttttttttctttttttggtttttcgagacagggtttctctgtgtagccctggctgtcctggtcctcactctgtagaccaggctgccttgatttctttccgtttaagactagttctttcttaaacttcagatatgctctatgatattgttgagtaggaagttgtctgaagttttccctttttgcttggggagtgcacagcctgcagctccctggggagtatgtctcggctgctgaaggagtgaagactttgatggcataccagttgccaggacaggtgtcccagaaggctttctcatgccagctactccaagtatgtgtgaaagtcatctgcttccccagttggtaccttttcttgttctggctttcaggcctattcaaatctactgagagccaacatggacgggctgaagaagagggacaagaagaacaagagtaagaagagcaaaccagcacagtgacaggcgtggctgctaccaaccagctgcacaagtgcatttttcctctgtttgctgctttcagcacctctgtatgtaactgtttccacggaagggtcctttaagagagaaggactgggatgggcatgggctagttgtggtaagacgccagtttttgatttgtgctgtgtggctggatattcttagattccagccgtaaggtttctagtcatctttgaggagctatgcatcattaatctccaggctagctgctttttttcctaccctatttatgaca

SEQ ID NO: 438 - DNA, 659 bp, Mus Musculus
gctgtaaccgctggaggcttctgctgacggcgtcggacctgcggagcccaggatggtgttgctcgagagcgagcagttcctgacggagctgaccaggctcttccagaagtgccgctcgtcgggcagcgtgttcatcaccctcaagaaatatgacggtcgcaccaaacctatcccgaggaagagttctgtggagggcctcgagcctgcagaaaacaagtgtctgttgagagccacggatgggaaaaggaagatcagcaccgtggtgagctccaaagaagtgaacaagtttcagatggcctattcaaatctactgagagccaacatggacgggctgaagaagagggacaagaagaacaagagtaagaagagcaaaccagcacagtgacaggcgtggctgctaccaaccagctgcacaagtgcatttttcctctgtttgctgctttcagcacctctgtatgtaactgtttccacggaagggtcctttaagagagaaggactgggatgggcatgggctagttgtggtaagacgccagtttttgatttgtgctgtgtggctggatattcttagattccagccgtaaggtttctagtcatctttgaggagctatgcatcattaatctccaggctagctgctttttttcctaccctatttatgaca

SEQ ID NO: 439 - protein, 110 aa, Mus Musculus
MVLLESEQFLTELTRLFQKCRSSGSVFITLKKYDGRTKPIPRKSSVEGLEPAENKCLLRATDGKRKISTVVSSKEVNKFQMAYSNLLRANMDGLKKRDKKNKSKKSKPAQ

SEQ ID NO: 440 - DNA, 19758 bp, Mus Musculus
gggcgggtgccatgtgagcctagcctaagcttcctctcctgttcacccttcttccttctcttctcctgtcccctggagaggtttgcccaacctctccaaagagggacacttgacatcatgtctttgctcaaccctgttctattgccccctaacgtgaaggcatatctgagccaaggggagcgcttcatcaagtgggacgatgtgagtagggttcgcctcccccccctcaaacccccagcccccgggacggtgggggctgggctgcttgggagctttgcagaacggagggttggtttatgtcttcccagcacccaggcgcctatgtgtctgtcacaacagtctagataaacaagtctggggtgagggtgggtgctcctggctgctgtagggaaggaagcctctgtgtttgggaataagagagggggctatgtgtgtttgtgtgtgtgtgtgtgggggggagtcagagtcagaaatctttggacctgatttgcccttttcaaatccccgaagatgataaaggtttgtttctagtaacttcagtgttggtagggggaatgcatgtccctctcctcccgcctcagctgagatcaggaagagaggtcagtcaggtcctcttcccagcacagacaccccaaatttgctctggcaggaggcccgtaaccagctgcaccatcccagtgtgcagaacaaactgtgtcctgtcccagggaagccatattctatctcaagctactactgtggcaagagtcacaaaagggccgtggatccagttgaaaacgggaggctcaaagactggggtctgagaaggaacttactgacttctgcttcccccatggtggctcagctcagctcagccttctattacctgccaacctgtcatccggccggggagggaagaccatctgcaccccagcccagagtctgcgccttcctaactcgtctctggtccttctgggctgaagacacagccactaaccatagaatcttttggtctaagaagaataaaatgagaactgtcactcagagagggataggcctccttaagagtgctctagcctggcctcaggaaggcctgatgttctcaacagcgcatgacatttaggaggtcacctacaattacttcagctccctggattggctagtctagtttctctatgaactgaggggagtctgaagctagacccttcggggctttgttacgttaaggcatctggctgtcaaaactgtggggatggggccctggcatgaaatgctttctgtttctctagaagttggtctctagaagttttggttggtgtggcatggtggtggcatgctggtgacatggtggtgatgtggcgtgtctcagagtctatggaaggaggaaaatgactcacaatgaaaagtgaagtgactctctcagttcctctgggaagcctgtataacctgaggggggctgtaggtcatcagggataaggcatgtgattctttctccaacctgtgtgtctggttgaccaattcccttccccaacccagagtgctgtgtggtccctgaactctgacttgcatgagcaagaatgtcccaagcccaggcatgggacacatgacctatggaccaggttttgctcttggatagctttggcacagttagtagatatatggctctatattgataactgtagttgaaaggatagaaccaaacctgactctgtctagtctcccacagccccttcagaacgtacttagaggggaaacctttcctggctatagaaagaaactcagcaagctctcagacatgaccttcacccttgggcaatagtccaggggtccccacaacgcccagtccttttctaggaacacattagaagtgaagctctaaccgtgctttggcttgcattttgcccttctccttccaggatgaggtgggggcaactgcaggcttcctggaaaggggggtccttcgttctttctcttccagggcttcctacgtggggcgcaaggaagaatgagagttctttcttgaatatatgctgtcgactgctggcttggagtttctaagcctgacagaacttgacacttattctttctctggtgacctttttgatgatttggggagaccctcctccatgtattggggctggcttgcttgaaatctcccaatacctctctattcagggactcactcacgattgttttcagctccctctcactggtttcctccctgcagctctgggccttttctgcccattcctcacacatgtgtcggctttgggtccagcaaacactcacattttactgtacaggcaactgcaatcagaggcagtctgccccacaccttctgggtttcccagcctagagaccagctcctgtctacgccatcccacactaaacagtcttaaggtcaggagccagcacagaccctccctggggctcactacacagcctttttccaaaatcggctttcttataaaatccttcccccacactctaaccacctgtaatgtgggaacctttcttgttccatttccttggtagatcctgtatttggtctggtgtgtcagcagcaataatcatgcattgctggaaacttcagttgtaataccttgtttatatacgcaaaggctattaaaataaatgatggcctatgtactgtgtgagtggagtagggatgtaggccagtttgctcattcgtttgcatactcactcagcaaactccaaggttaaccactaagcaccaagttcaaggtctagctggctcacagcccttgggatccttgagttcataggcctttcccagatgtgtgacccagttcctgtccacacttattaataacagcacgcttcagacaatcttttgctgaaggggtaaagtgtgggctggtcttttgagacagtttaggctgagaagttttgaggacttcactttggaggtgggaaggaactcggtgtctctttggatcatttggacaggatgggcagccagtgctcacggttgaacggaaggaatctgaggatcagggctgatgctgggttgtacagggccttggctgtgaggaccagagctcggggcacgctttccaagatggcagcaaggaatcttggagagagattctatcctttggtggaaccgtgacccctgagaacaaggaggggtagaggcattgcttggtgtccagaaagtgcacctctcctccaggaaccccacctcccttcctcaagacctccctattgttagctcagagaacaaagggaaagacctttttaatttctaggaaagggatgaactctatctgaattcttagcctgggccaggaatgttggcctgagatccgagagcagatagctgactccttctttccccaggaaacttcaatagcctctcctgttatcctccgtgtggatcccaagggctattacttatactggacatatcaaaatcaggtaagacactacccaacatggctctcagctccaagggatccaatgagctccgctagaaccctggtggtataggatggagacatgtatgtaggaggtgcagagagtgtagctcctggggctctccaatgggcagggaaggaaggtgcagtcatctcatttcatggctgcccagagcccacctactcttaagttagtatcccttggagagatagttccaggtcattacagagctcagggctcagaggacaggcgcagccatttagagaaacagaaaaaggcctgggggttggaggtgggggcctccaggataaaatataggctgcagattgcagctcttattccagggaaggggtgaagagtacttctccctaaatagacagaagctgatgagcagtaagtgaagggagggatccaggaagcctggggcagtcttcgcatctagaggaggcagcagatggaatgggaagggatgtggaaagccctctcccttctgcgtcattattctccacttgacctccttgtccccacctttctctgctcccactgggaactgctaccaggagatggagttcctggatgtcacgagtatccgagatactcgctttgggaagtttgcaaagatacccaaggtaaagagggcccagaagcagccacgagttgcagagggcaaggagtgagtctctcctggaggtggggagcctatctgtgtgaccagatggatgagtcctgggctgctaggcaacgaggatgccagctgaggccaaggaagggtggtgtggtggctgctgctcagcttgcctggatcctgaggctgggaattcctgtccctgagtatgccaggcggtctggaacatgtcttctaccccttgctcccatcttggtgatgctttgcctacatttgcctaaagcttgtgagaagattgaaggtaccgacagttggaagcagtattctctgagataggagctaagagtctatcttcaaacaaaattcccaggattctcaggtcccactgcgttgccaaccaagctcttcccatgggcctctccttcccgtggcagttgctggagccagggatagggcgatgctgaggcctgtggttttgtggttcctaggttccatggccgttctgataaggagatacaggaaaagacacgttgggtaagattgagagcttccctctgacttacggtgtcactgtttcctacagagccagaaactccgggaggtcttcaacatggactttccagacaaccacttcctgctgaaaacactcacagtggtgtccggccctgacatggtggacctcaccttctacaactttgtctcttacaaggagaacgtaggcaaggtgcattggcaacacctgggtagagtgctggcccttgggagagcctgcccttcctgagactcataggcctgggcgaggggctcaggtgcacgtgtggccaggagcttgacttcggggctctgtgttctgtaggactgggctgaggacgtgctagctctcgccaaacacccgatgacagtcaatgctcctcgaagcacattcctggacaagatgtaagtgcctgttcccctcttcccccacctccacgcctgagctcaaggggttggcttcccagcccccacactgatgggccactgtccacccctccagcctggtgaagcttaagatgcagctcaaccctgaagggaagattcccgtgaagaagtgagtctcctgcgcttgtcctaacagccacccagctccccaagccttccctcccttggcacgactcctctgctgcctggtacctttctctgctcctgcagttttttccagatgtttcctgctgatcgaaaacgggtggaagctgccctcggtgcttgtcaccttgcaaaaggcaaagtgagtagttctccacccccagtcaactctgctagttctcattgccaccagagcaaaggtggcccgggggagggtgatggatggggagggcagaagcccatagctccccaagccaattaagcagaacctctggtgactgacactaggcataaaggtgggaccagtgcgtgagagtgcggtgcaggaggcagtgttggggaggacagcgacagacatggcgagcttgagcttttctatccttgcctcgggcataggagattgatgttttcattgtggagatcaagataggaggcatcagggacaggaggcgggccacaggctccaggaaaggactaatgctgcagggcgttggggagaggggcagagccaagagtggaagctgccagggcacagacttcggctcaatttggaaacacattccacttccttttaattaagcaattaatttttaattacaaatcagaagtagggtcaccacatgagatgtctgtgtgatttaccaaaaaaaaaaaaaaagagagagctgtctaggtagataaggcccagagccaaggtccaagtctggtctggggtggtgttggatcccttttgcaccttggccagtgcccttgtgtcaagtctcaccccaggaagcatttcccccccccccgggaagaatttaggacactagaagtgagtagaactaagactctaagcagccatccttataaaccacacaagaaatgcgcccccataggcccagctttcgtagccatggcgaccccaagtgcagccaggtacactggattcaagcatggggcagggagaaggtggactggactcctgaggtgcctgcctgcttctagtaacacccgcccacttctctcctgagctcatccccagctgcgttctccatatttgcttcttgtgtccccgtaaaagccactgactggcttcggaggcagagctgggctgggggagatctagccatgttctccggctcagacccttatcctccaactaagactcgtgttgatattccagtgtgatcctgaatggcagtgaacgttttgttttctgaagggacaaaatgaagagaacaggatccctgcatactgtccatctaatttctttttctatttctatagaattacgtactcagctcagacaatctatggtcttttatgttgtttattcactcaacattgtattttccagagtcatccatgtgatagcatcactacttcatatgtatatgtatatgtatatgtatatgtatatgtatatgtatatgtatatgtatatgtatagatatgtgttgtatatagacatatgtatatgtatacacatgtactaagtacataatatatagcagttatcatattccatgttgatagatatttggtttctctccactctttgactattatgaataatgcttgtataagcatgttgtcatgatttagctattagtcttgacatatccaggtgaaattgttcacatgactatatggtagctctatgttgaccattttgaggaactgacaaactgttctctcaagtggctgccacattttactttcctgccagcatacacaagggttcccgtgttcctacgggccatcaacactgctacagtctgtcgtttctttatgctgtcctagtgggaatgaaatggtatcgcatcttgattttaatttgtatttgcttaataactaataatggtgaattcttttcatgtacctattatttctgtgtctcctttacagaaacatcatttcaaagtcgttgtctttctcttcttcttcttcttcttcttcttcttcttcttcttcttcttcttcttctttatgcatgtgtttgtggtgtctgtatgtatttgtgaatttgtacatgtgtggaggctggaggttgatgtcagaggtcttcctcaattacgctccatcttatttttgaaagacttattttttaatcatgtgcttgtgtgtatctgtgtgtggatatgcacatgtgagctcaggtgtcctcaggggccagaggcatcagatcctctagagctggaattgcaggcactgtgagctgtctgttgtgggtgctgggaatcgaactcagagcctctgcaggatcaatgttggcttgttcttaaccactgagctatctctccagctttcatctcagtatttgaagggctttcactgacccaggagctcatgtgttcgaggatggctggtagcttcagggatcttcttgtctctgtccattcccagcgctagggctacagacacacaccgcagagaccagcatttatgtgggtactgggggtctgaactcagttccttataatgcacagtaggtgcgtgaacaaccaagccatctccccagcctttgggctatctttttgttgttgaattaacacttaatggataattgatttgtaaatattttattttgtgaattgtctatcctctctcccttcctctttccctccctctctttcttccttagctattagccttcagcctcttgatggtgtccttacaagcatacatttgttgttgtttggttggctgttttttcaagacaagatttctctgtgtgaccctggctatcctggaactccctttgttgtccaggctggcctcgaactcacagagatccatctgcctctgcctctgaagtgctaggattaaaggtgtgcaccaccactacccagcaagcatgcatattttaaattttgatcaaatctgattttatttctttgtgtgtgtgtgtctgcttttcccaatttcttgtcttttgtttgatgtgtgtgcacgcctgtgtgtgtttgtgtgcgcgtgctcactggggctcttgcgtatcaggcgaattactctgctcctgttgtaccagtgcatttctccctccagttcctcaggctttagccctcacagtccagggctctactgttaggtgcacatttgtctatggtcatactgtttctttagaaactttgtccttcacttacaaagttaaaaagaaattaacagcctgggaccctggcaggcaagcagggccccttgcttatgacattttgtcctcttcattctgctcatgcttagttccaatctcattccaatcccggaactagccactatccaaaatcaccatcagagcaagcccgctaacgggcactgcagtcaggcggcaagctccttgagacgtgcccgatgtgtctgccgcctgtctgccttgagtaactcctctcctatcaggccctcttccccagagccgggtgggaggtcgtggtgaggcttagctctgaggaggtgagatgaaggctaacaaggtgatggttcttccagaatgatgctatcaacccagaggacttcccagaatccgtgtacaagagcttcctcatgagcctctgtcctcggccagaaatcgacgagatcttcacttcctagtgagttccttgggctgggcgtggagtccttccttccacccgtccttttgggaatcacagggttgtacaagagaagagggtaatccaagcctccaggtccaaagggcatacacctgtgcctctctctctggcctgcagccactctaaagctaagccctacatgaccaaggaacacctgaccaaattcatcaatcagaagcagcgagaccctcgactcaactccttgctgttcccaccagcccgtcctgagcaagttcaagtgctcattgacaagtacgaacccagcggcatcaatgtgcagaggggtgaggaccaaggaaacctcctacttcccgtagtcccatcgcaccctgagggctgagtgacagccgtgactgcttgctgttcactgtctcccaggccagctgtcaccagaggggatggtctggtttctctgtggaccagagaacagtgtgctggcccacgatacactgctgatccaccaagacatgacacaaccactgaatcactatttcatcaactcctcacacaacacctacctgacaggtgggtcctggaagcctcatgctgagctgctcccggcctccagattctccacagatgcctctccactactgcttgtccttctgacagggcagactatgaggtagcgaggggcctgggcctggctgtgagtgacatccctgccccttctttccactggttcagccggccagttctcaggcctttcctcggctgagatgtaccgccaggtgctgctgtctggctgccggtgtgtagagttagactgttggaagggcaagccccctgacgaagagcccattatcacccacggcttcaccatgaccacagatatcttgttcaaggtgggtcttggggtgtgggagctgatgacagtggccatcagaaagagcctgaggttgggaagggaagctgaagggaagaaacatctggaatccctcaggctgttgggaggctaccatggctatctatctagttttatgtgtatgtggagactaagtagtggggagaagctaccctcttcacggagttcctttctcctctaggaagcaattgaagccattgcagaaagtgcctttaagacctccccgtatcctgtcatcctatcatttgaaaaccatgtagactcgtgcgtatcctggtccagcctcttgcctgaacccccaacccccaacacacgcacatatactgtccctggcctctaggcatccatttagtctccttcggacctcagcatctccttcctctgttcctacctgccccacttcctgggcccctgatctgggttatcagggcacagaagatgggcaagaggttggtgctaagcagccaacccctacctgaactttgtttcctgctaacagaccccggcaacaggctaagatggctgagtactgcaggagcatgtttggagagaccttgctcacagatcccctggaaaatttccctgtgagtgtacagtcttgtggggcatctggaaccaggtcagcgggacagagatacttgagtttattcgatggattgatgtgtcagagagtatgttagaattaggagtctaccagtgtcagaaacttggttgaaagttaggcatggtgacagcacttacatttgagaggctactgcaggaagatctcaagttacatgctcacctgggctgcatactgagaccctatctaaaacaaacaaacaaaaaaacaaacaaacccaaatgtcacaagtgctgtcccaggcttctgaccctcttcatgaggagacagacaagaatccaggccaattacagccagcgtttgtttgggaagcagtgctcggagttagaggatcaaggcaggctttctggaggggtgcgatgggtaaggtgaagtctggaagatgacagagattcagtgagcatgtgaaaagagcagtctagtcagaaggaatgggtgaaagacacatttctgctgaggaacaggtaatttcaggcaaatgggaattcaagacacaaggggcagtggttggaggcgaagcagcagatgtaggcccacaccacaaggacacaccacagggggaggcaatggtacccacctcttccctgtctacagctgaaacctggcatccctctgcccagccccgaggacctccggggcaagatcctcattaagaataagaagaaccagttttctgggccagcatcccccagcaagaagcctggtggggtggctgagggcagcctcccgtctagtgtccctgtagaagaggacacgggtgagtgagtaagggcagtggggtggggtttggggagagccagggctgatagaactgtgtgtggcagggtggactgctgaggaccggactgaggtggaggaggaggaggtggtggaagaggaggaagaggaggagtcaggaaacctggatgaagaagaaattaagaagatgcagtcggatgaggtgtgtgggggcagtccctctgggtggacatgggcgatggcgttggctctgtactatttctttttccactctcccccttgtcctctagggcacagcaggcctggaggtgacagcttatgaggaaatgtccagccttgtcaattatatccagcccaccaagtttatctccttcgagttctctgcacgtatgtacgctagtatagggtgatctgggagagagggcaggccgggttcaggaacaggctgtcctggttcaagagtggccttgtgagtggcatgaaaggaagggacctgctccctcttggactaagggccttgtctataaatacccagcttaggagtcaggcaaagggcttaagtggcagtggctcccagcattggactgaagaacttggcagcaaacagaatgtcctggtgtgtgtcagtgacaggcaggttggtgtgacaggccacctcagccaggcctgtctggagcttctgccatttcctaaggttttgcagctcccacgcctgagctctaccaagtgctgccccagctctaagcctcggccctagaggaagagttcctgggagaacacacctttagtcctctgtgaatttgaggccatcctggtctacagagcaagccccagaacagccaggactctgcatagagaggccctgtctgaaggaggggaggtggagggaagagagcgcccatgagggggtggaaagcagagcaacctccagaggctcatgtactgcatccgatccttccctttttgtgtgtcgccatgacacttgccctgatctttccaagatgcccttgagtgcatttcccactctctgcatctaaccaacatgagtacctttctgagcatttgtgtacacgtggatctctgcaacactgactccccatatctgaattcccagcctgttctgctacctaggcacacgcaggaggtgtttggagggtgtggggtactacccttactatacagctcccctatgcacctgccgattgcttgcacatttcactccctgtgaacatcactgcctgggtatccttaaggtttcaccagccaaggtccccgggatgggggcttgcaggaaggcctggggtcctgccaatggccttggccagcacctagactcaggtacagctataatatgtgagctttgtgtgtcccaggggtacagacacgtctcttccaactacgtgccccagctgctctcttgccaagtgcgtgtaccatgcgttcctgataccctggaatcggccgcatatgtccgccacaccctacgtgcctatccatggcatatggaccccactctttctcaccgtgatgcagatttcctcctgcatgtccacagtgatgtccctttaccccagcacatttgtcggcacacattcctctcaaatctggctgctactaggccctcagacctcaacagaatccttggttggaaacaccactctatgggggaagtgccccaaaaggaaggtggggctgatagaggaggcagcctgatgtggactccctcccttttctcccttgtacagagaagaacagaagttacgttgtctcttccttcacggagctcaaggcctacgagctgctctccaaggcctccatgcagtttgtggagtatccttgaggctttgccagacaaggtccctggtgggatggggcttgggggagggtctggggtcctgctggtacaagtggccttggccagctcctatactcagcgacagctataataaacgccagatgagccgtgtgtaccccaagggcacacgcatggactcttccaactacatgccccagatgttctggaatgctggatgtcagatggttgccctcaatttccagacaatgggtaagaacacttccaaaaccagagagccctcccctgggcctctcactacctccccagaaccctcccctgggccctgcattcccagatgcccaccctcagaaccctcctctgggccctgcttatctgatccttactcctccctggataaagagctttgatgcctactgggtgtggtgtttgtgtaggctctgggagcataccctggtagtgagagcactttggggaggggctcattcccccattcttgttcagctgttcatatatcggagcatacataagacatgaaggctggcatgggttctggctgctctgtttggatgtcacatctgtgccagctctcccagatcctctgtgaatttacagtcataccattattccttgcttactttaggttgaagacccttcctgaaaggctaggtacccccaagggaatgggaaggggcatgagaaactcttaccttcatgatctgcctaaactcccccattcccaagacaaaaaaaaaaaaaaaaaaaggcttgaaagtattgaaaagagactgagactagaaccaggttacaccatcctcaccacatcctctcgtccccccagacctgcccatgcagcagaacatggcactgtttgagttcaacgggcagagtggctacctcctaaagcacgagttcatgcgcagactggacaagcagttcaaccccttctcagtggaccgcattgatgtggtggtagccaccaccctttccattacggcaaggcccagggctgacaaatggctgggagggctgggctcttgaaaagaaggctaaaaagcccacccctctacctcaaccccctttcctgatatcttgaagacttcaaccccaaccagttcctgcagtagcaagttgccttggaaactgcctcctcctcagcattggagtctgcctcttggtccccatggaaaccaaggggaagggctgaaactcccgtggggggaggggagagagagagacagagacagagacagagacagagtctggctatgctgggcagcaggagcccaagctccagcagaccagggggtaaacgtttgttgcttctttcttgtgtgggtggcctgcctctgctcgggagtcctggaaagcactcaggtccttaaagtgtgcctgcaaatcttttttggttttgttttcgtttttcgagacagggtttctctgtatagccctggctgtcctggaactcactctgtagaccaggctggcctcgaactcagaaatctgcccgcctctgcctcccgagtgctgggattaaaggcgtgcaccaccatgcccggcatgtgcctgcaaatcttgagtcacaccgctgctatttgatggccaatgctgaagggggatcatcacaatacccactgtagatacttagccttatggggacagaaaccccacaggcacaggaatcaattggaatggggtatctaatgctggccttcccctggcttctcacccttagatcatctctgggcagttcctgtcagagcgcagtgtacgcacctatgtggaagtggaactgtttggcctcccaggggaccccaagaggcggtatcgaaccaagctgtcacctactgctaactccatcaatcctgtctggaaagaggaaccctttatctttgagaaggtgctaggcgtctgtccctagttcttcgcctgtccctaacatttaaaagtcccaaactcaagtttgcaaggtgtgtgtgtgtgtgtgcgtgtgcatgtgtgtgagtgtgtgtgcgcgtgtgcatatgtgtgtgtgtgtgtgcgtgcgtgtgcgcgctcgcgtgtggcggaggttgcttgtacacattaggattagggataaaaacatgaactctcagcccagaagctaacaggtgatggggttctttgtctccttggacactggttggcaaagctaccagggctgtttgcatggcaaacatctagtccattttcacatgtaagcctggctcaaactggaagatgcctgtatgtaccgtagggcattgcttctgcctatccttaccaaatctagcaatgttggccacggtctcagcctggcacttagtgagacttctggagtcaaggggaggggctgcttggctccccactgtctgctcctcagactctgctgtcctaaactaccatagatcttgatgcctgagctggcctccctcaggatagctgtgatggaagaaggcagcaaatttcttggacaccgcatcatccccatcaatgccttacattctggtaagggactgggggtcttaactactcacagagtctgagacaagaatagcctcctgtctgggggcgggagtggccttcaggcagggtctccgaggcctcagcttcctccctcatgttatcagcttatctgggacaggaatagactttctccaggaactctgcccacctaacagaatgcccatgatcttctggagtcactgttacagatttctgagcagctggcatctctgggcacttagagtgtgtgagaggagctggtgagatggctcagcgggtagagacacttgctgctaagcctaatgatccgagtttgaccctagacaccccatggtgaaagagagagacccggtcggttcccacaagctgtcctctgacctctgcttgcgagtgcacgcgctcacacgcagagtaaataaattaaaatgtaataaaaaggtgtgaagagcttataacacattctcagaataaacgcacacacggcagatagatgaggagtcaaccaagtgttaacgtagcctgcccaaagccacacagtagggaaggatagggaaggattagaaccctggcctttgactccagaaccagaggtcctgagtgcttgcttgtgctgtggtgctgagagctctcgcttaccacccacctcaccgtgttccacaggataccaccatctgtgcctgcgcagtgagagcaacatggcccttaccatgccagctctctttgtcttcctggagatgaaggactacatacctgacacctgggcaggtaggagacctgtgcctggccccgagctgtcagcttcctctccattcactaagccagtatctgaagtggaacgagaaagggtggtcggtggatccttccgtgccttaaactccatacacattgctcatgtcctgtgttcccagatcttacagtagcccttgccaaccccatcaagtacttcaatgcccaggataagaagtccgtgaagctcaaaggagtgacaggaagtctgcccgaggtctgtgtggcctgtaccactcccagaaccctccacgagctgtggaatgagtggggaggggcagagtcccccactcagggaaaatcgtgttagagccaccgttctaaccagccaccctcacacagaaactcttctctgggacacctgttgccagtcagtccaatggggcgccagtctcggcaggcaatgggtcagcaggtaggtagttctgggttcagctgcctagatagctctgcacctctctcaccacacacctagtcccactttcatcaggggagggaagatctgaatcggaagcctcaacactaagaaagggggagttgcttaaactacaaccccgcaggaaccaaactgaggtgcctccaaagcacctgacagtccagctctgtgctcttacagcgcctgggaccaaggccacgggggaagaagctacgaaagaagtgacaggtgaggcctgctgagccatgtgatcgtggggcaggatctggagggagggcctgggactttggctggggtgggggtggcctgcaaaactgggaggatgctctgggcctcatggcacctcaagccatgcctctgcagagccacagaccgccagcttggaagagttgtgggaactgaagggcgtggtgaaactgcagcgaagacatgagaaggagcttcgagagctggagcgccgtggagcccggcgctgggaggaactgctgcagcgtggcgccgcacagctggcggagctccagaccccggcagcaggctgcaagctccgcccgggcaagggctcccgcaagaagaggtaccggcatcggtggccccctgccctctctgagagtggtggcgcctggttcaccgcctgtaccctcgtggcttccgcaggaccctgccctgtgaggagaccgtcgtggcgcctagcgagccccacgaccgggcggacccgcgcgtgcaggagctgaaggacaggctggagcaggagctgcagcagcaaggcgaggagcagtaccgctctgtcctcaagcgcaaggagcagcacgtgatcgaggtgtgggacaacagcaatagcggcaaccaaccccaccctttctgcacagccaagggcttctcgcgaagctaactaagctccttcctccttcgcagcaaatcgccaagatgatggagctggccagagagaaacaggctgctgaactcaagaccttcaaggagacctcagaaacgtaaagtcaagtcgtaaagtcgcctcttgtgactgcctgcccctacctcccgccaaaggctgcgatccacagaatctctcccccctgtctgtccgcagtgacaccaaagaaatgaagaaaaaactggaggccaagaggctggaacggatccaagccatgaccaaggtcaccacagacaaggtggcccaggagaggtaaaccctgaaggggaggcccacctgagcagcctccagctggaagaaggtcaaccctacgagggctcctaacttgattcccatagatctgcctctgtcttggcccttcacaagttagttctatagctgtatctctcagtctcccttgagcaaaacccagatgctaacactgcttaaggaaagaaaaacaatggaaggaaaaccgtgcacaaagagagggagatggaacctacgggtatcagcctgttaccttagatgtctgcatttgccactgtgcctaccctagatgactttctgtcagagtgttttaacgaggaagtggacccaggactctcaatagtccttccccatcttccatgttggtctctctgctcctccctgcttcagtgatggagttcttgtttgtcgtacccttaggataatttatggactctgtccctttataaaactccaattgtatcaacaggctcaagagagaaattaacaactcccacatccaggaagtggtccaggctgtcaagcaggtatgcagggccgtgtccttcccaaccattctcaccataggtttgtgtgggggatgtgagtgtccttcctttgagccctgaaagcaggctgcccagaagtgtccatgcagctaggaatgagaggaagtttcccaaggttctggcctgtgggtggagcctgccagccaggagggactggcctgggaaacatgagttagcaggtcctggaagaatgggattggatggggcgggagaggaaggcttcctggggcgccatggaatggaaaggggaagggaaacactgctgagaatggacctaaaactccttccctgggcactgctgaccacagtaacaggtctgccacctactgtggcctgacctcgtgtcaggcactatgacaggggcttcctgtggaccagacatgtgatccttcacaatccccagtgcgattacctcactttacacattgcaaaagctgcccagaggttaaggagtttgccccagagtctcactgctggctagctgagatgagagctggggtccagcctttatgctgcttgcctgtctgtctgattctctgtctcttacctgaacccagatgacagagaccctggagcgtcaccaggagaagctggaagagaggcagacagcctgcctggagcagatccaggcaatggaaaagcaggtgagagctctgtcctagtcccagtggagctaaatgggtggaaaggggcccaaccccaggggctccatacaagaggtcaggggaggggcccatcacacctcagcagtgggccacaggcaggttctcatggtgtcccaaggccctgtcaagtgaggcatctctacagatttctttgcttgatgtttctcctggaaggttctttggtgggtcttactctctccatcccctcccaggctcttggaagtcccgaatagaatgggcatcttagtgttctatagtctggggcaggcagggccccctcctgagcctggtaatggtccctgctgtccctgcagttccaggagaaggcgctggcagagtatgaggccaagatgaagggcctggaggctgaagtaaaggagtcggtgcgggcctacttcaaggactgcttccccaccaaagcagaagacaagcctgagaggtcctgtgaggcctctgaggagtcgtgtccacaggaaccacttgtgagcaaggcagacactcaggagagccgcctctgatgccagcatctcgcttcaacatttaagcaaggatgtccacactcttctctggaacatggtcccatttcccaggagaaagggaccttaatactcagataaggcagggattagagactatcaagggcaagtgtcctcatggaacctgggtcttttctaagctggcttcttctgtctgtcccacctgtagtgccattgaaggcaaaggaatatggaccaagagagaggaaactgggtcctggcctcccctctgcctttcctaatgtacaaacgggcgctccacttggagctccgttccctttcctggacacttggctttgctccctggaac

SEQ ID NO: 441 - DNA, 3895 bp, Mus Musculus
gggcgggtgccatgtgagcctagcctaagcttcctctcctgttcacccttcttccttctcttctcctgtcccctggagaggtttgcccaacctctccaaagagggacacttgacatcatgtctttgctcaaccctgttctattgccccctaacgtgaaggcatatctgagccaaggggagcgcttcatcaagtgggacgatgaaacttcaatagcctctcctgttatcctccgtgtggatcccaagggctattacttatactggacatatcaaaatcaggagatggagttcctggatgtcacgagtatccgagatactcgctttgggaagtttgcaaagatacccaagagccagaaactccgggaggtcttcaacatggactttccagacaaccacttcctgctgaaaacactcacagtggtgtccggccctgacatggtggacctcaccttctacaactttgtctcttacaaggagaacgtaggcaaggactgggctgaggacgtgctagctctcgccaaacacccgatgacagtcaatgctcctcgaagcacattcctggacaagatcctggtgaagcttaagatgcagctcaaccctgaagggaagattcccgtgaagaattttttccagatgtttcctgctgatcgaaaacgggtggaagctgccctcggtgcttgtcaccttgcaaaaggcaaaaatgatgctatcaacccagaggacttcccagaatccgtgtacaagagcttcctcatgagcctctgtcctcggccagaaatcgacgagatcttcacttcctaccactctaaagctaagccctacatgaccaaggaacacctgaccaaattcatcaatcagaagcagcgagaccctcgactcaactccttgctgttcccaccagcccgtcctgagcaagttcaagtgctcattgacaagtacgaacccagcggcatcaatgtgcagaggggccagctgtcaccagaggggatggtctggtttctctgtggaccagagaacagtgtgctggcccacgatacactgctgatccaccaagacatgacacaaccactgaatcactatttcatcaactcctcacacaacacctacctgacagccggccagttctcaggcctttcctcggctgagatgtaccgccaggtgctgctgtctggctgccggtgtgtagagttagactgttggaagggcaagccccctgacgaagagcccattatcacccacggcttcaccatgaccacagatatcttgttcaaggaagcaattgaagccattgcagaaagtgcctttaagacctccccgtatcctgtcatcctatcatttgaaaaccatgtagactcaccccggcaacaggctaagatggctgagtactgcaggagcatgtttggagagaccttgctcacagatcccctggaaaatttccctctgaaacctggcatccctctgcccagccccgaggacctccggggcaagatcctcattaagaataagaagaaccagttttctgggccagcatcccccagcaagaagcctggtggggtggctgagggcagcctcccgtctagtgtccctgtagaagaggacacgggaaacctggatgaagaagaaattaagaagatgcagtcggatgagggcacagcaggcctggaggtgacagcttatgaggaaatgtccagccttgtcaattatatccagcccaccaagtttatctccttcgagttctctgcacagaagaacagaagttacgttgtctcttccttcacggagctcaaggcctacgagctgctctccaaggcctccatgcagtttgtggactataataaacgccagatgagccgtgtgtaccccaagggcacacgcatggactcttccaactacatgccccagatgttctggaatgctggatgtcagatggttgccctcaatttccagacaatggacctgcccatgcagcagaacatggcactgtttgagttcaacgggcagagtggctacctcctaaagcacgagttcatgcgcagactggacaagcagttcaaccccttctcagtggaccgcattgatgtggtgatcatctctgggcagttcctgtcagagcgcagtgtacgcacctatgtggaagtggaactgtttggcctcccaggggaccccaagaggcggtatcgaaccaagctgtcacctactgctaactccatcaatcctgtctggaaagaggaaccctttatctttgagaagatcttgatgcctgagctggcctccctcaggatagctgtgatggaagaaggcagcaaatttcttggacaccgcatcatccccatcaatgccttacattctggataccaccatctgtgcctgcgcagtgagagcaacatggcccttaccatgccagctctctttgtcttcctggagatgaaggactacatacctgacacctgggcagatcttacagtagcccttgccaaccccatcaagtacttcaatgcccaggataagaagtccgtgaagctcaaaggagtgacaggaagtctgcccgagaaactcttctctgggacacctgttgccagtcagtccaatggggcgccagtctcggcaggcaatgggtcagcagcgcctgggaccaaggccacgggggaagaagctacgaaagaagtgacagagccacagaccgccagcttggaagagttgtgggaactgaagggcgtggtgaaactgcagcgaagacatgagaaggagcttcgagagctggagcgccgtggagcccggcgctgggaggaactgctgcagcgtggcgccgcacagctggcggagctccagaccccggcagcaggctgcaagctccgcccgggcaagggctcccgcaagaagaggaccctgccctgtgaggagaccgtcgtggcgcctagcgagccccacgaccgggcggacccgcgcgtgcaggagctgaaggacaggctggagcaggagctgcagcagcaaggcgaggagcagtaccgctctgtcctcaagcgcaaggagcagcacgtgatcgagcaaatcgccaagatgatggagctggccagagagaaacaggctgctgaactcaagaccttcaaggagacctcagaaactgacaccaaagaaatgaagaaaaaactggaggccaagaggctggaacggatccaagccatgaccaaggtcaccacagacaaggtggcccaggagaggctcaagagagaaattaacaactcccacatccaggaagtggtccaggctgtcaagcagatgacagagaccctggagcgtcaccaggagaagctggaagagaggcagacagcctgcctggagcagatccaggcaatggaaaagcagttccaggagaaggcgctggcagagtatgaggccaagatgaagggcctggaggctgaagtaaaggagtcggtgcgggcctacttcaaggactgcttccccaccaaagcagaagacaagcctgagaggtcctgtgaggcctctgaggagtcgtgtccacaggaaccacttgtgagcaaggcagacactcaggagagccgcctctgatgccagcatctcgcttcaacatttaagcaaggatgtccacactcttctctggaacatggtcccatttcccaggagaaagggaccttaatactcagataaggcagggattagagactatcaagggcaagtgtcctcatggaacctgggtcttttctaagctggcttcttctgtctgtcccacctgtagtgccattgaaggcaaaggaatatggaccaagagagaggaaactgggtcctggcctcccctctgcctttcctaatgtacaaacgggcgctccacttggagctccgttccctttcctggacacttggctttgctccctggaac

SEQ ID NO: 442 - protein, 1149 aa, Mus Musculus
MSLLNPVLLPPNVKAYLSQGERFIKWDDETSIASPVILRVDPKGYYLYWTYQNQEMEFLDVTSIRDTRFGKFAKIPKSQKLREVFNMDFPDNHFLLKTLTVVSGPDMVDLTFYNFVSYKENVGKDWAEDVLALAKHPMTVNAPRSTFLDKILVKLKMQLNPEGKIPVKNFFQMFPADRKRVEAALGACHLAKGKNDAINPEDFPESVYKSFLMSLCPRPEIDEIFTSYHSKAKPYMTKEHLTKFINQKQRDPRLNSLLFPPARPEQVQVLIDKYEPSGINVQRGQLSPEGMVWFLCGPENSVLAHDTLLIHQDMTQPLNHYFINSSHNTYLTAGQFSGLSSAEMYRQVLLSGCRCVELDCWKGKPPDEEPIITHGFTMTTDILFKEAIEAIAESAFKTSPYPVILSFENHVDSPRQQAKMAEYCRSMFGETLLTDPLENFPLKPGIPLPSPEDLRGKILIKNKKNQFSGPASPSKKPGGVAEGSLPSSVPVEEDTGNLDEEEIKKMQSDEGTAGLEVTAYEEMSSLVNYIQPTKFISFEFSAQKNRSYVVSSFTELKAYELLSKASMQFVDYNKRQMSRVYPKGTRMDSSNYMPQMFWNAGCQMVALNFQTMDLPMQQNMALFEFNGQSGYLLKHEFMRRLDKQFNPFSVDRIDVVIISGQFLSERSVRTYVEVELFGLPGDPKRRYRTKLSPTANSINPVWKEEPFIFEKILMPELASLRIAVMEEGSKFLGHRIIPINALHSGYHHLCLRSESNMALTMPALFVFLEMKDYIPDTWADLTVALANPIKYFNAQDKKSVKLKGVTGSLPEKLFSGTPVASQSNGAPVSAGNGSAAPGTKATGEEATKEVTEPQTASLEELWELKGVVKLQRRHEKELRELERRGARRWEELLQRGAAQLAELQTPAAGCKLRPGKGSRKKRTLPCEETVVAPSEPHDRADPRVQELKDRLEQELQQQGEEQYRSVLKRKEQHVIEQIAKMMELAREKQAAELKTFKETSETDTKEMKKKLEAKRLERIQAMTKVTTDKVAQERLKREINNSHIQEVVQAVKQMTETLERHQEKLEERQTACLEQIQAMEKQFQEKALAEYEAKMKGLEAEVKESVRAYFKDCFPTKAEDKPERSCEASEESCPQEPLVSKADTQESRL

SEQ ID NO: 443 - DNA, 52633 bp, Mus Musculus
gaagacacctactgtgatgataaggttgcttctgccatctcaggccagtgaaagtgcatatccgaaggctgtgttgaacgagaaggcagtaccgctgttgagacaagtccaaaggctaggccagggactgtccttaggggctcctcgttatgatggctggagaagggtcaaccattactagccgtatcaagaacttgctgaggtctccatccatcaaattacgcagaagtaaagcaggaaaccggagagaggacctcagctccaaggtgagtcctgttgggagccacctcttacctactctgtcctctcctgcacttcgttccttttttttacctttctctttcttgaggggcaggaagggggtgggagaatgaaatttctctgttggctttaaaagatcatatacgcttatctttgacgacctgatttgaagttggaagaacagcaggcgtgggtgggcatgctgagacgcagccatggcttgaagaagggcataggaaggcaaactgggtttaacagggcctcagtttaaactaagtgtgtgcttgggaaacaagttgacattttatgactcagtttctcttcttagaagagtacagtgagatcacatattctgtaaaggacctagctgtgactaatgtattagtgtaacagttggggttataatgccagactgtacaacagaaagaatatactaatacacttcatctaagagagcaaaacaattttttgacaagcttagtgatgcatgcctgtaatcccagcactagggagtcagaggcaagttcagcctggtctatataacaatttccagggggagccagggctacatagtgataccctgtcatgttcaaagatgtagaagattgggctggcaagattggactggtagagacctttgccaacaagcctgatctgattttgattcctcggacccacatggtggaaggagtaaaccaactcctggaagtagttctctgatctccacatgtgcatgcacatatgcaggggaagaaataaatgtaaaatggtttatctctttaagatacttaagttgctgggctggagcgatggctcagtggttaagagcattggctgctctaccagaggtcctgagttcaattcccagcaaccacatggtggctcacaaccatttataatgaggtctgatgccctccctcttctggcatgcaggtgtacatgcagatagagcaatcatatccataatataatataaataaagatacttaagttgctttaactggaacgtcttggtttctcgtgataacatgaaggagccacgtgtgtgtgccagaaaggcagctctcctggtctgtccttgtggcactgctcattctgagcattgtatgccagcatccttcttctgggcagacgttcatccatcttccattcttatacatgtctgggatttggtccttatacttttttttttatttgtttggttttgtttcaaggcaggctcttgttacacagtcctggatgggttcgaactataaacttgtgccacagccttctgagtgctgggattgctggcatgcccagctcatattttattcagttttgagactcatcacaatttggggcatacaaaagtagaatacatttatttacaagatttcccttgagggagtcttgagcattgttcccacaggatcagattaggttttgtgtcttcctgggcagggcccataaacatagtaactctgtgtggcataggattgccaagggcacagtccttagagacagcagcatattgttgctctaccttagcagagcaataattggctttggtgcccctttcaaggatttttttttccgagacagggtttctctgtgtagccctggctgtcctgcaactcactctgtagaccaggctggccttgaactcagaaatccacctgcctctgcctcccgagtgctggaattaaagtcgtgtgccaccgcgcctggcaaggattcttattaataattgttcctattctctagagacagaagaatgggtactccaacttagaaactcatagataaaacttaaaaaaaaaaaacctttcacttatcattatcattacatcatgatgtgtggatgcatgcagccacacatgtgctgtggtgttgtggaagtaaacatggaaagcatttttgcctaccaagccatcttgctgtccctaacgatatagctccagctgccctacaacacctgactgtgtctctctctcctcagcatatcctgctgtcgtgccccaccacaacaggcacctttctgactcgtggcagtgctattagaccaagtttctcttctcttttggctctttttctggccaggactagtaaacataatagggtatattatgggagttcagcttgtggtatgagtacttaccatgagtgctctagaatctggaagatgccaaggccatccttaaagactggcacatctgtcatcattaatgtgttctacaagttgagtgcctatagggtgaccaacagtgaagaatacattatccttgccaccaaggagcttgtagctaattagacatgtgaacaagtaatgacgaccagatttggtaagtgctgccgtagaaatatgcactgagttactaatgggattacggggggaaagaaattaggaaagacttcacagaagaaggatatttgaactgagtcccgaggtaagagagggtcactctaggaaaacagtaaaggaagacatctctggcattaccattaaacattctcgttccaagtaggagatcggtgctgcccttttacttgagtcagaagtgtctctgtgcacctgcctttaaacatatttttttgtgtgtgtggtttttcgagacagggtttctctgtatagccctggctgtcctggaactcactttgtagaccaggctggcctcgaactcagaaattcgcctgcctctgcctccaaagtgctgggattaaaggcgtgcaccaccacacccagctaaacatatatttttttaaagatctatttatttaatttatatgaatacactgtagctgtcttcagacacaccagaagagggcatcagatcccattacaggtggttgtgagccaccatgtggttgttgggaattaaactcaggacctctggaagagccgttgatgctcttaaccactgagccatctctccagccccattttcagtttttttaaagatttatttatttgtgtattttatataatataggcattttgtgtgtatatgcataccagaagacatcatctgaagttgtgagttgccatgggggtgctgggaattgaactcagaaccttgagaagagcagtgagagagtgctcttaaccactgagccatttctccagcccctgtgtcttcatgttctttacccctttcacagcgcactgtgaggacactgtaactagacagtgagtgggaaaggagtacagggttgagatagaggtgtcagtgcagatgaatgtggacgtgcagaagaataagagctgatcaggaagagctctgagctcttgaaaaatcagaaccaggattaatgaaatagagagagcactgcttattccaggctttttactcaggagggagccattgaaacatggttaaatatggtttgaagccaagatgagagccagcaataaagggggggggggttaatgactatagggaaattagataagcaatgagattttatcaagccttttcacgggaaagggggtttctatatagagtaaattggagaagactggtttgagatttgatgccagggctgcagatactgaaagaacttgaagctctcttcgttgtgactttcaagcccaaatcctgtacatttggtgttccccacctctcatctcagctgaggctgcgttttcttcaggaaagaaatgtgtgtgctcttggtagctaatcctctctctcccccctgttcctgaagcttctgaagacttttgtatagatgcaacttgagttgttctatttttacaaaggacagaaatggctgagccggcaagattgaagttaggaacacaaaaggattgcctgtgctaaagggtctttttaaaagccatctttcctagtctctattaacctgctgtgggttatattattctctctgataacaccaggcaaggcggttttcttgtagcccagttttatgattgcacagcttttcttgttctctcctgtatgattacatgggcttactctgggccttttaatatacggtagctctaagaaggatgtgtaggtaggtttcatgaaagagcaaagactgcaataatctgatcagcctttgcttagtttttgagcccagatattagtatagaaaagcctcttctgcctttttgttagagggagctgtatttattttcaaagcctttgtgaatcaaagactagtttggtgctgactgcctgggagagtggttagtagggcctcagattattaacattttaaaaataagtattctgcggcctggggatgcagctcagttggtagagtgcttgcctaacatgcatgacaccataagtcccatcccctgtcccccacacatataaaccaagcaaagcaacacacacccaaagtcccagcacgtggacagttgacactagtctggattatatgagattccatctcaaaaagagaaggaaaagaacccttttctcaggagcccttctcactgtgtggaggcagagccccatggagtggagtttggtagctgggtgtgtattaagttctgtcagaagcccaccgtctgttatgaacctctggcctaagttggttttatatcccagtccagcagtccagcctgggacatatgctcttttccatcaatagttttttattcttgtctgtcttctagactcatagctgcacagaatgtgccgtgtgtatctaccagaattgcactgctgtgaggtcagacctatggagtcagttgttgtcttacaaagacagttcccaggagtttcccttgccatcaggagcaggaaactagatgataccatctgatgagcccaggccagctttatgtctcaccattccaggaacagctcactttaggacgcctaggaatgaacagatctcattgtttgatatatactttctaaactctccacttgggacagatgaacaagaatagaggtctagggccagtagctgagcctcacccccaagccccttaaactctgccctcttgcctcagcctccccagagctaggattgttggcatacgccaccgtgcctggcgtggagtgttctgtgttaaggcttatggagtgtcttgaaatccttagattgtatgagcagtgctgccctcctggcttggatcatcttccctcggtgccactagcctttgaagtgattctcctcacctctgcccttttgtctgaaaatatcctggcctcttcagagtctgagttgtctccaggggctctgcccatctccttggctacactctctccagagtctctccctcgctttgctgttctggccacattatcatgttggatcagcctttggtatttttttcaatgccaggattaagcccagaggctagacaaacactctaccaccacgtgtccccaagccctccctcaaccccactggattctaagttcctaccaagtagaccttggagttctctcccatcacttccatttgtctcctgtgtgttctcatttcttgatgaatgaggaaacacaggtagatgtgaggcagaagcctgattctctgccatccccaaccccttgactctccagctgggctgggaactgttatcactgcccctcagagagcaggccagggcttgaaatctagaactgtttatttaaactaagcttctctgtgaacatcgactatcaagctgtccttagagtatctgttggttttacttcatgtttagtgttgttagggggaaaagctacagtgttttcaataggctttgttatgttagacatctgtttgcattgctacaagctaagccttctagttctccttcagtgcagagcacagagttttctgcctgcctcctttgcacagcgcttccccagctctcaccgagtgcagcccaggctaacccaccttctttggtgtttactgttctactgctgtgagaattccctccctagggagacatcaactgtatctactccttccttataaagttccagtgacaaagcaaagtcacatttcaccagagttgaccctggggagcttattgtgcttgctacagagcatggggagggggtggcaggagtttgggggaccctagagcggccatactggaaagttgtcacaggatatgcatccttcttcagcttgtatgcttcagctcctctccagacactctgatagcgtagtgcacatgcagtcagggcagtcacataaaagtggctgggaggcagagggaggggagcagccggaatctcggggaaggtgcagtgattaaccctctacccttctcggagaggacatcagcagacagcttggtggtggtctcttgaaatcatggctgatgggatgaggatggcagctgttctgcttggctttgccttctttatttttcttaagaggagaacttcttctgtaggccaggctagccatggtagttctcctgcctcagccctgcctcccaatgctgggatcagaggcttgtgccactcccacccttaacttctgttatctcctacttaaaatttaaaaatgaaagggggcagggattaagggagaatagaagtgagcatgacagtcacttttatgtattctttatccatcccaagggaatctcccattttcaaaagaacatctagaaactttgatagccagtgtatagtgtacaggttggagaaggtggggtttgtttgttttttaaatgatttatttttattttatatgaattggtgtttttccagcataaatatctatgtgaggtgttggattcttaggatttgaagttttaagtgttgagactttttcacatccttccttactctgcccttgtaacagcaagcccatatagtgctgcttttggttttctttgtctatttctttctctttttcttttactttttttttttttttttttttttttgacaaatccttgctgagtattgcaggctgggttcaaactcacagcccttctgctgccttagcctgctgtgtgctggtggtaggagagtctcaccacaccagttgtgttcattacctcatacccaggttctgaaggacacttagtagggctcacagagcagtctcctcttagagtgcctgggagtacattttactccctctcactgcaacagaagaagtgtgtagggctttttcctagtctgtaaaacaagcatttgttaaagactagatttttaaaaaagatttatttattattatacataagtacactgtagctgtcttctaccagaagaaggtgtcagatctccttacaggtagttgtgagacaccatgtggttgctgggatttgaactcaggacctttggaagagcagtcagtgctcttacccactgagccatctcgccagccccaaagactagattttaagctcacatgtctcatcctcccctagcactgaaatgaggctgaagatgctttctctcctttctttttcattcatagttgaaatttaaatttacttgaaagtcttggcacacttagtgcagtcatatggtgataatcccccccccccccacacacacacactcacactttgtcaaatgctcttttagaggcttcgtgagaagagaggttggtgttctttggaaatgttgcttttttattggtgctccggctggaacctaaggccttggtctaataaactgagctgtcccgggagccagcttcccctctggttggggtgtgagcactccttttccttgatgaggtgttaccatctcaccgtctgagagctgcctcacttcagcggtgcttgctccatctccttatatgttcgcctggtcccttagaggtgctggcatgtaacagagaaacaaaactcctacaaatatatgaaatgcaacatgtagaagagtttatgaagcataatggtatatcatgaataattgcttccatcatacatgctggaaactgatgacacttcagatggatactaggtagctgagctggagttcaaaccttgacttacatagttccaaagcccaaatgtaatcattattctgtatccctcccaagggaatcttcatcttcaaaagaacgtctagaatttccatagccagtgtacagtgtacaggttggagaaggtgaggtttggttttttaaaatgatttatttatttttgttttatttgaattggtgtttttccagcataaatatccgtgtgagggtgttggaccccctgaagctggatttacagacagctgtgagctgctgtgtaggtgctgggaattgaacctgggtcctctggaagaacaaccagtgctcttaactgctgagctatctttccagcccattggtggaggggatgtgttgtttcattttatttttgttctgttttgttttagatacacatttttatcagagtttggtggagtggcgcagatctgtaatcccggcacttgggaagtgggggtggacaggacgtagggagttcaagatcatcctgtcttcaagaccagagagaatccagcctgggctacacggtcctcagtctcagaaacagaaacccaaacgattgtgaccacaggcgcactcaccctttcccatcccttccctagaaagatcagtggaaagaattcctccatggccagctttagacccatgtctagcaacctctgcctgtctgtagtcttgcttttcctctccccctggtgctttcctgactccctccccacagcttgccatgggatatgttaggaagcatttaacttgtgggtctgtgggtaattgaaggtcaagttgttgcagctgtgtggttccagatgcccatgagccagagcagttgatgccgcttttagaattagtgggaagcagaaactgccagatgccttggtcatctctaggcatcagggatggctgcgttttcatctgaggtattgttgggcaagctgattgagtctcttctgttcttgaggagggcctagtgtaatgctagatctttccctccagctgggcctatttgttgctttagcctgtaaccaaccttgttttttaaatcatggagaatgctgagtgaaatctttatttttgtaaaacaaagcagagctaccccacatgcaccatgcctgagagatgacaggactccatgaacttgaacgacagaaatgaggtcagctgttcacctgactccctttatctgtgtagctccagggttataagttttctctagcagatgtctgcccttacctgacctcaggtctgtatggttttgatttcttctctcaagtaggaaagtgtgacctgtaagtacaaaaacatgggtctcaaggcatgctcccctgaattgcttacacccaggacccgcttccttgggccacactttgagttagtaggctgctggggcagtgagtgggtagggagagggaaatcacacacacacacacacacacacacacacacacacacacaacaccttcctcacttcagagggaactggctagtgtcttatttgtaaaattggatcctggtgcattccagagctgtggtgaggcttaaatgagatttagtgaccatgaaagagtggtgtaaggcccaaacagcttcacggttgtaagggatggctaatgttaacagagcacaaggatttgtgtagtatcaaggaactttttcctaacttgctggtgagctttagtttctagtttccatttgtgagaagtccctatttgcaggctcaacatcttttgttatacatccttaataccttttccttgctaatgatctaacttgtatcagtggtggcgcacgcttctaatcctagcacttaggaggcagaggcaggcggatttctgagttcaaggccagcctggtctacaaagtgagttacaggacagccagggctatacagagaaatcctgtctcaaaaaacaaaaaaacaaaagcaaaaacagaatgctaaccgaaaggaagggttagtaatggtttctctctctctctctctctctctctctctctctctctctctgtgtgtgtgtgtgtgtggtatatatgcatatgcgtgcacacatgttcacacttggaaccctgaaaagtcagctgtcctgcaccatcacctctgccttattcccctgagacaacatcactgagcctggattcagaccaagctccagtgtctaccctttacccacttggtgctgtagttatagaatcataccaacctttcccatggatgctgctgatgtgaatgcaggccctcatgcttgtacagcagtcattctttcccatggagccatcacttcaacccgccatgcacttttttgatactaactacattataatttatttcagggctatagcagtgagttttttgtaattaaaagtcaaattaggagccagagagatggttccatggttaagaacactggctgttcttccaaaggacttgggttcaattcccaggatctacatgcagttcacaaccatctgagcaatgccaaaggttccaggggatctgacgcccagctctagcctctttggacacatagcacgcatgtggtgcacagacatatgtgcaggcagaacacacatataaagtaagtcagactagtgagccttcaggggtgtggtgaccccattttctatgttagatcaaaagctattgggtttatgagtatgttttcttatagcaatgccttccataaagtagagaaataattttcctttggagagactaattcatttgtattgaagtttcagtctaagaatttaaactcagtgtgtgaaaatatagtaatgttataacccactgagcttctaattgtgactgcagtgaaatttttatgtaaacagtttggtcgagctgatcttttggtgcatccctggagtcccagtaattataagacttaggcaggaggatgaagagttcaaggccagcctagactcaggaagatcttgtctcaaaacagatggacagcaacaaagagaaagaaagtagtgtgtgtgtgtgtgtgtgtgtgtgtgtgaacctcactaaatctatatgaagacttgagggaatagatatagtcatacctaactgatgctgttgaccatcagctagaagaattttgtaatactcactagaagaaacactaaagttttgttgttgtttcttttcttcttagaaagatttatttatttatttatttatttagtgtatgagtgctctatttacatgtcaaaagagggcatcagaactcattctggatggttataaaccaccaagtagttgctgggaattgaacttaggacctctggaagagcaaccagtgagccatctctccagcccaaagcttcatttttttgttttgttttaaagatttatttatttattttgtgtatatgagtacattatagctgtcttcagatacaccagaagagagttacagatctcatttcagatggttgtgagccaccatgtggttgtggggaattgaactcagaacctctggaaaagcagtcagtcagtgctcttaaccactgagccatctctccagccccattgctttttagataatatttttcataatagtgaaatctttgatgttctcctagaaactcttgacaaaatggcatactcatatgaaataaaattccttgtatctgctgaaaagaataatgtcagtctgtctgttgatgtgcagtgaagtgtaagacacacatgtagaacaccagcagattgtagagtgctttggtaatgatcacctacacagttttgaaaacatacccatctagtagtgtacacatagaaagcgaggctataaacatcactggtgagtattgcttacctcaggaagagttaggttatggtcggctgtcactgcaattttgtaagatttgaatctgaaataataagcctgcatttttgcattatttttataagtagaaaaagagagtaaagataaaaaaatttcttcaattagaatgtgttttgagggctggtgagatggctcagtgggtaagagcacccgactgctcttccgaaggtccgaagttcaaatcccagcaaccacatggtggctcacaaccatccgtaatgagatctgagtccctcttctggagggtctgaagacagctacagtgtacttacatgtaataaataaataaataaatctttaaaaaaaaaagaattgattaaaaaaaaaaaaaaagaatgtgttttgaacttaaatataaaatatttgaaatctaaaatctatatttatttttttatattaatattatataaatattaatatatttatatatatattagttacactcaaatgttactgaaaatatgtctggtatcagcttggtggtttgggatacgtacacacacatatgcatgtgtatatacatacacatatataagtattaataggatataaaagtgctttcttggggttagagagagagagatggcttggtggttaagacagttcccaactgcctgtaactccagctccaggagatctgacacctcaggccctgtgctcctgcactcaggtacacacaccccgacacacacacacacagagagagagagagagaaagagagagagagagagagagagagagagagagagagagagatgggggaacaaaaatagaatcttcaaattttctcttgagaatccctgataaccatgtaaatctgagatctttaaataaaaatatttcctcattgatgtttagtcaataaaatgttttgatgcttttaaagcaatacatactttatgaaaagagtttactcaaggtaatgtagagaagcgaataatgaggaaaacatcccataacttcaacactctgagagactactgaaaagtcagactcaggatatgccacaggaaagctaggatttcagtgtgtggtgatggaagaaatcaagctaaagcccgaggcaacttttgggaataaagaataatccactgctgggcacgcctttaatcccagcacttgggagcagaggcaggcggatttctgagtttgaggtcagcctggtctacagagtgagttccaggacagccagggctacacagagaaaccctgtctcaaacccacccgctccccaccaaaagaagaagaaaaaaaaaaaaagaataatccagattggcgttgaaatgtgcacgtttcttttaggggagtagtaggaaatcaaatttgaattgggctgatgatgcaaggcgcaaacatttacttagttggtaacaaggaccccttgagagtttttgagcaagaagaaagggtaaagtctacaagagggattgatgtgattttccattaggaaagtaatgaaggccttgggccacggaaggagtcttgtgacatgagtctgtaggcagctggagcactagagtctccccacccccctccgtcagccacacattcactttacccaggtcggctagacaaggaaacggtgagcattcttgctgctgacacagttggaagccaggagatcaagggaaacactcagctgtgtagattggtaaatgtcccttttctgttgctgttttgggacagagtcccatatagtttgagactatatgagacctcaaacttactatgtagctgagttcctaatcctcttgcctctgactccctggaattacaggtgtatgctgccacatcagctttaattaggctcttttggggaccagacttccttcaggtcataatgctttgagattctgctcttagtatagagaagtcagacattagagggaaaagtcccctcccccatcaggtctgaattgaactgtctgatatctttgcttttctggtaaccatggaaaagtaagggagggtcagaaggcttcctctgccgagaaactgggctactcaggctgctttctatgctgacagggcgtgggcgcgtgctggtgactgggctgtaactggctctttagcggagtcccttcattccctctctttggtctgatgttttcttgcttgttccttcatttgcacagaaaaccagactgtcttctagcactacacttccagctcccttggaaacacgtgctagctctccatattggccataggcttcgtgcagcatggcccagagatggctgggttctgaccacacggtgatccagcattaggaaaagctctgtccctcttttattgcagccatctagtgaggagaggcaagaacccatttttatagacttgtttcaactaatgctaagctgtgacttttttgtgtgttttgttttgttttgttttgtttgagacaggtctctctacattgccctggctgttctggaactcactatgcagaccaggctggtctcaaactcacagagatccacctgcctctgcctcccaagtgcttgggttaaaggcatgcaccactatactttgtccaagttgtgacattaaaaaacaaaaaacaaaaaacaaaacaaaacaaaatattgaagccagggctggagagatggctgagtgtttaaggggcacgctgttcttacagaagatctgctcccagtacccgtgtcaaacagctcataactgcctttaactccagttccagaggactctgcaggcatactcactgactcacacacacacactaaatctttgttgttgttttgttttgttttgttttcgagacagggtttctctgtgtagccctggctgtcctggaacttactttgtagaccaggctggcctcgaactcagaaatccacctgcctctgcctcccgagtgctgggattaaaggcgggcaccaccacacctggctgactgactgattctttatctgcaaaatgctagttcttcataaagttgtcaagaatattgcatgagacactcagtgtgaagtgctcagatcagctctggacaggctgtgttcagtgagtggtagctctggctgcaggagaaccagtctacacagacccttctgacccctcaagtattaccacaagacttgaagtgctagtttctccttttggttccagcaagggctaagatttgggggaaatggcaaaatgctttaaatatagttcaagccaggtatagaggtgcacacttttaatcctagcacttggcagggagaggcaggtggatttctgtgaatttgaggccagcctgatctacatagagagttccaggatagccaaggatacaaagagagagcttgtcttaaaataaataaatattctagttcaaaatctgattcttaggatcacttggaaagcttttctttttctttttccttttttgacccgggacatctgtgttgtccaggctgacctacaacaaatggcctcaagatttctgtcagcccagaagtagcaggaactttagatgtgaagctggagggcttttagcatgcagattaacaaccctttcttgtgttttgttgttgttgtttggttggttggttttggttttttgagacagggtttctctgtgtagccctggctgtcctagaactcactctgtagaccaggctcgaacttagaaatccacctgtctctgcctcccaagtgctgggattaaaggactgcaccaccactgcccggctcatttcttgtgtttttatccagaactgtgcaaagccagccatggttttgtctgcctacttggaggctgaggtaggaagggtgtttgagcccaagaatttgaggccatcatagacacttagggagaactgtctcaaaaaaagtggtgggggctgggagatgtgtcatttggtaaaatgcttgccacacaagcatgaggacctgagtttggtcccagcatctgcttgagaaagtagacatttgcacacacctgtaatcccagcgctggctccctgaggcttggtggccagccagatcagttgaattagcaagttccagcttatagaagatgccacatacgtgtgtgtgtgtgtgtgtgtgtgtgtgtgtgtgtgtgttttgcaggatataggggaaagggtatagacaatgggtagaactgctatctgggggttgtagggtgtcttgaagtaattctattgctaagccaaaattgggcaacctttattctagtgtgctggtctccagcgacttgtggctagaggatctatctctaagattatttcttccaagcagtagcagattgaccttccttagaagctgaggctattttcatcccagcacaggagactccactcagctcccattaattctgaattgttgagcagaaaagcttggattgttgtcctcttgggacattggtttctggtagtctttgtgggagatagtacagctctgacttagccacagcaggttaaaaaccaggcagagttgagaggcaggtctgtttgcctgacctagaaggatcctttttgctctacttacctctaaccaggtgatactttggactctgaatcgacagagtccttctgtctcctgggtccgtccagtcactgggtcttggcacatctgcctaggtttctgtggaaagcctgctggccgtgggctcctctgtggcttttgcgtaagtggtagtttttagaactgggtggaaaatgtgctttgtgagattagagtgtagagaacagacaggagactgtaaacagtttttcttaacctgtaggaagggaggaagcataccagggtctaacaggccacgtttgtccagagtgagttacgcccctggggttcatcacttgcattgagtgggactgagaaacagaagagagtagggaagaggaagctgggggcagcaagatggcaacagaggcagattgtgtttgaggtcagccaaatctagatgaccctggcttcttttttttttttaaagatttatttattttatgtatattagtacactgtagctctacagatggttgtgagccttcatgtggttgttgggaattgaatttagaacctctgctctttttagtcaagcctgcttgctctggtcggcccccactcactcagttcttgcttgttccagcccaaaaatttattattatgcataagtacactgtatagaagagggtaggtatcagatctcattacaggtggttgtgagccaccatgtggttgcttgggatttgaactcaggaccttcggaaaaagcagtcagtgcttttacccactgagccatctcgtcagccccgactctggctttttcaaagtgactctggctcctagtgccccatctcgagggagcagtcccttcatagcatgggcagacttcaggtccttcacagtaagaaagacaaaaccttcacagtttatgtctgatccaggcaaggaagcctccttgtagagcgagtgagcaagctggggatgcaggaggctgactaggaagagctgaggcctacagttcccagggtgtggtgtagctgaacagtcccggccttcttggaactgctgtgggcggctctaaggtctgaggagtcccatccctgtctccttttagcgcccatgctgactggtgctcctccctctctattgctgggtacctcgtccttccatagtataaaaatacgttttctccagagctgtgcttggtctctccctcctgcctctgtcccctgctgtctttcttgttgggaacacttctcagtacctgtttctagccctaacctctctccgagctctgtgccttggtttgtactgttattctgttgcagctgtctgtcggctcggtctcattacctctcacctgagctgctctgctagcctcataacttcttcggcgttccagtcatctcaccaaatgtagctttgcttgggttccccccaaagcctccagaacctaaagattataatttgacactcaaggtcttaaattttttgttttgttttgttttgttttgtttttggttgttttcaagacagggtttctctgtgtagccctggctgtcctggaactcactctgtagacctttggtgtttccacttgtcaagatcctgtaaggaggcttgcaaaatggctcagcaggtaaagacacttgctgctaagcctgataacccaggattgaccttgggacccacatgggggaaggagagtacagaatcccccaagttctttgaatgatgtatgtgtaccatggtacatagatacacacaaaataaataaatgtaatcaaataattgctgtctgtgccacaatgcgtactctcaaggttttgaaagaaacttcatctctaaatgccaagaagacagccaggaaacaccgaatccccactctgcaccattaggctgggtctccttccatgaaggcttccttgtttcccttccttgaacttttccagatgtcactgtcttcttgttggggactttgttctttttgtgacctttgtcacacactggattactctctagtagatcattccccacggttttaaggagtgtgggtgggactcgtatagcatcctagtgactcagacttaaagataaaatgacggaggagctagagaaagaactgaaggagctgaaggggtttgccaccccataggaagaaccaaacaaccagaccccccccccccccagagctcccagggactaaaccaccaaccaaggagaacacatggagggacccatggttccagccacatatgtggcagaggatgaacttgtaggccaccaatgggagaagaggcccttggtcctgtgaaggctcgatgccccagtgcggtgcaatgtaagggtggggaggcaggactggaagggtgggtgggggagcaccctcatagaagcaggggagggtggtgggatacggggtttggagggggaacagggaaaggggataacacttgaaatgcaaattaagacaatatccaaataaataaataatttgtggctggagcagatgactcagcagttaagagcacatactgatctcttccagagaaaccaactttgtttccagcatccgtgtcaggagactcacaaccacctgtatgtaactccagctctaggggcatctgacgtccctgacttctgcaggtgccttcactcatgcacacatacctgcatacatctgcactctgcacatgtgcctggacatccctacgctcattgaacacacctgcacgtggatttttttaaaattagaattcaaaagcaatttatttttatttcgtatgtattttggcctacatgtatgtctctgtagtacaatctgtgtgacctacccttggaggtcagaacagggcatcagatcccctgaaactggactgaaagacagttgtgagcctccatgtggattctagaagttgaacctgggtcctctggaagagcatcctgtgctcttaactgctgagccatctctccaataccagcttccagacttttgaagacatccattaatatactttacattgattctgactatccacataacccgaaacaagtttcattggctgacttgattctgcatgatccatttttattctgtttattcattactaactaaatcagttttaagtcctattctaagttacagactccagttggcagtactgttttgtctaggatgactgagtggtcttccacctgtgaaccacctgtttcccctgcacaaccctaacaagagccagaagggcactttaaacagactatttcagataaactgttacaaagttactttacccttttatctcattagagtgagggaaatattgcctacctcctttccctctggaggatatgatatttccctgtctattgcacactgggagtggtgggtgtgtcagctctctctcataggctactatagaactctgccctccaggagcattgcttcagtggaaagatgacaccagtgtcaggctgggaaaggctgtcctccatttcaacactctgcacctgccaaagcaagagctggctcagcctcttaacgtggctgcccttccagcgttacactgcactgtggatgtgtagatcatggcagtgcctatgtgtagataaagggggtgccctgttcttgagtcctggcttctgtaggcttctgtagtatacacatacacacacacacacacatacacacacacacatatatatatatacttaaatatattatttcaaatattttaaaatttttaaatttatttttcaaatttaaaatttattttaatttttaatatatatattatttatatatatttagatttaaatatattatatattatatgttaatgtctatatgaatatttttcatgtatgtaggtcacacatgctgggcgtggtggcacacaactttaatcccagtactcgggaggcagaggcaggcagatttctgagttcgagccagcctggtctacaaagtgagttccaggacagacagggctacacagagaaacactgtctcgaaaaaccaaaaaaaaaaacaaaaaacaaaaaacaaaaaaagaagagggtcacacatatatggcaacacagtacaacttgctggtctatgttcttaccttcaactacatgggccccagggattaaagtcaaatcattaaggttagcatctcattcttttacctactaagtctcctcgacagcctgggttgggttttatttcactttcagttatagtccatcacagggggaagtcagggcaagaacccagaggcaggaacagaatcagaggccatggaggaactctgcttactggcttgttccccatggtctgctcagtttgctttctataccatgcaggaccgcctggctgggagtggtaccatccacagtgggctaggcccttttgacatcagtcaccaagaaaatgcctaacacacttgcctacagacaatatgacagaggcttttcctcattgacataaaacaaaacaaaacaaaacaaaacagaaaactagccagcctacataactagtagagtagaacaactctattaactgaaataccccagtttggggggttttaggggttttttggctttttttttttttttcagctttcccatgactcatcaaatctgtcagtgcctcttttgttttctcttatacactcccctcctgctcctctccctaactcctcccataggcatcctccatttctccgtccctccattgttttataacccatagagttatttttgtggtacccacatatttgttgggtgtgcggccatctactggaatgtcatgaaccttccttaaagaaaactcactccaggaggcagaggaaggcaggcatcctggagtttgcagtcagcctggtctacattgtgaattccaggacaccctagctcaacaaaataaaacaaaacaaaatcttgatcttcccaggtcttacccaggcccccacagctgctttgagtccatgagctccatgggcctggcatgtccagaagacatcgttttgctctggtcctcccaagtttttggctcttaaaatctttgcaccccttctgcttgatggcccctgggccttatcaagtgtgtgtgatgttaaaggtcccatctgtagctgagagtcccatggatgtttagctgtactctgactggttgtggttccccttttctctccttctttttcttttctcttatttacttttgagacagagtctttctgtgtagcgctggctgtcctggaaatctctatgtagaacaggttgtcctcaaactccagagattcacctgctcctgcctcctaagtgctgggatcaaattcatgcacaacaatgcctggatagttttgagttaatcaaccatccattgtacaaagaaatgtcccttaagaggtctaagggctactctaatctatgggtagggacatatgattttagaagggcccttcagtactctgtttatctgacagtatagtagtagttggttcaccatcatgttatgtgggtgatgtagtctagtgctgcagatggagatggagagatgactcggtagttaagaacacatgctgatcttgtagaggacctaggttcaattcccagtacccacatggagactcacaattgtctgtaactccagttccagggatctgatgctttctgctctcctcaggcatacttgtacacatacatccatgcatgcaagcacttatatacataaaattagtcttttttaaataaaaaaaaaaaggatacagaaataagtgatggaactctgcgtccccgtccttgagggctcctgtatgatagggaagcattcaggaagggataacatcttatctgctgtgcatgctgtgaagatagtctagccgagtaaaggccggagtgatccagagaagcctgaacggcttttctgggcagacagcctctgagcaaaggcctgaataaagtcactgtgtgcatagctaagggaaggactttgaatccatggaatagcagattcaaaggaggtcactagagtctgctcaaggagcctgtggagtctgaggtagaagtggaggtggctgagtagaggcagcaaagagagtataggaaatgatctcagagaaatggccagaggctgggtgattttaggcctttccaagtttaagtcaaatgtttgcgtttgaactttaagggaggtgggagccaatggaaggatttatgtttacaagaatcactgtggcctgctgtgttgagaagactgtagcaggcaggcctaaagctgggagcacatttaggagttacagtcctattccaaatgagagatggtaggcactagaacttattggtgcactactaaataatgcaggatccctgagaatggggagaatcctggactgattgccacattaaagttctcccactgctgagacagggctcccagtgccctaccagctgtgggaaaagctgtgcatatatcaatgttgatgagctggggcaagttcagtcctgcacatagctgatggcacttggtgtgtttagcattcgtggccaggcttttctccacgctgtagagcagagggaacctctactaccttttaaagagaggacagggaaaatgttatcagtgggggagagggggagagtcatcttgccaagccctttgtgttggagtgttgcagaacgagcctcgctgctgcaggcttcagtagagcttgggactctcagaccctgtgagagtggagagcagcccaaacctcccttccagcaaacaggaagctggtttgagttaagaacataaaataaaaaccagctgatgcccctgaatgttttcctctgctcctcctcttcagagagtcaaaggaaactgctcccactcctttggatgactactttagaaagccagaagaaagaaaaaaaaaaaaaaaaccaaacccataaatcctttgaaaacaagccaagatttcagcccatgcaaacttctgcttgtgggattttcctagccaggaagtatgttcctctgtgcaaagccctgagaggaaagtgacaaaacccaaagattgccatagttgggcctgggcctcagcctggcgggaagaagtgtgtggcggtttcccatgcttaatctcccggcacatgtggaggtcatgcggtggacagagtggatgtggctagaagtaaaagaaacatacagagtgtgtcacagcatgtgctgcgatcacggattgtttatgaaaattgtacttcagctttgtttgcctgtacacatacatgtatatacacactggaccacagtataaagcatgtttcttactatgactagatcatggtaaaaatggttttcttactatgaaaactgctcttcagggaatgcttaaatcaaaccgaatctttctgctttgcttgttgaaagttgcaaactacttttaatattctctatagaactggattctctacccacagaacacctactcacattcctatgagagggaagggcagccaagaaccagcagacttggtctttgggactaacactgaatgatagggaggtaagggattgtacacatttgaatctaaaaaatttgcttcgaattatattggtgtgatgagaactggaggtttgtagctcattgtacttgatttgatgacctctgtattcatcaaacatagtggcttcagactcctctcccctccctccctcccttcctccctctctctctctgtctctgtctctctgtctgtctgtctgtctgtctcatctctgtcttaggcagtaaggacaatagctatgctcctgaacaccccttcctctggtccagttaaaggctcagtgtcaagaccctgatctgggataactgaaggcagtagacttggagtctgtactctgtagtcagtaccaattgactggagccagtaaggctttagactgagaaagaaaatggaatgaggcagaaattcggacttgctgtccagaatgtctagcacaggcaggctaagattaggtctgatggtgcagctgggtggtgggtaagtgagcagcatggagcttggcctgacgcactgtaactaaaccaccggagcggtgcgtaagcacatgttgcagttcctggtccatagcacaaagaagcattcccacctaactcaatggccttggaggtttcggttttttgctgttgttactgttatatttagttgtgtgcatgtgtacatatgtgtgtggtcagaggagctaaacgggacctctggggcactttcaactcttccctgtttgagggcagtaagagaagacacatccagaactatgccaggtgattgtgggcttcccactctagacgctggcctgtcacagtcactcctcctggcgctgcatatggtttacccactcctggaccctccaagactatccaggtcagaggcttcataggagaggacgctctgtttacatgggctcctcaccctaaatcaaggaagaacaaggacatccccaagggaaggctcatgcaggaagtgcagacagccctggagggaactagagctggagtgaccagaaaaactgtgtgacaaggagtgccatggagggacaattatgaggttatagggcactgtgggtctcacatgacctcatccacagaaagactagtcaattaatttgaggttagtctagaagggtttgtgtggcctgcagacaatgcaggacagcaacaccgttgatgaaggtggggaatgtctcatgtgtcatgtcttctcagactatcctggcatttacacaggcttccctttcatctctgtgggagttttggcttaataacaataatcagagtactgtgagcatctgtgattcgcaaaaacacagcagtaagcccttcttaggcctcctaggctcctagacttttaactggcagacacgggagtcctttgatgggatgcaaagatcaaggatgtccgagttacctaattgatacctaacgttcttctggctctcggtagagagatcacagtggcctttgaaggtttgaaggccagtgacctcttgtcaatctcatagaccccaggtcctagcctacagttagtgccttctcacatcggaaggattcttgttcctctttggtcataaacctgtactttaacccatgttttctttcccatggtaacagcaggtggagcgtgattaatgcaggtgacacttattactggcattttctcatatggccaagaggattttgatcagaacaaagtctgaaaaagacccagactaaataaggttgtagggaaatagtgcttcagaggctgggttgtaggagcctttagcacccacctcgaaccctactgtgactgtcaccttacggtctgtaaggagtcacttctctgtcttgctctaacaggtaaccttggagaaggtcctgggagtaacagtatctggaggaagaggacttgcttgtgacccccgatctggcttagttgcctacccagcagggtaagtgcctttcagggcatcttgctacatgaaagtgtatcttttatttcttactaacatgttattcattgagaatttcatacaatatactttggtcctatttactcccttcccctactattcccacatccactccctcttcctacccatttaatttggtgctctctccctcttctctccccctccacctttttaaagacccatcaagtcatatttgtgttgcccaactactctcaggtgtggggcttatccttggatgtggtcaccctcccaggggggtcacaccattaaagaaagccggctttccctcttccagcagttgccaggtgccaacagcttctgggttagatgtgggacttttgcccactcaccacttctacccaccccccagtccacccatgttaggattttgactggcttgagctcactgagatcctatgaatgcagtcacaactgcagtgagttcttaggtgcaattgtcatgccgtatccagaaagtttccttgaagaaagttatggcctctggctcttacaatttccccaccctcttctgagaagaaccctgagccctggggagaagagtgtgacttgtgacatgtatgatcaatggtcagtgatccacttgaggtggacaggaggtttctgaaatctcctaagagagacatctaggtcagtgttttgatgctatttctgtggagaaaatgcagtctaagtaaaaattctttattgggtagtattctttctgtatcctgtattgatttttggtcacacctacccattcacacatacatatttgtatttttttgtacaggattcccaataccatcttttttaaaactatttttaaaatttttatgtgtattagtgttctgcctacactctgtagaccatgtgtgagcctcgtggaggccagaagaaagcatcagattccctgagactgaagttccagatggttgtgagctgccatataggtgttgggaatcaatcctagtcctttggaagagcagccagtgcacctaactgctgagccatctctccagccccagcaccatcttctgatccatagacagatcccttacccactgcaccactggcccacccccagctccatctttaataactaccttctagtaatttttaatggctttattgtgatatgacaccaaatgtttaaaatccctaacagggatgcggtaatgcccactggcagaatgcttacctattctcaaggccttagttttgattcctagcaaaataaatatccaactcatgaacttaagtaattttctagagtctgcagccatcaccacagtcaacttcagaagctccattcagtcagtcaggtgcagtgctctgtagtacttagtacttgagaggtgctctgtagtacttagtacttgagaagcatagcaggataacacttgagcataaggagcttgaggctggtactgttatcgactccatagtttagggaagcaaactgagatgcaaggtgaagcagtttgtttaaaatcacattgccattgtctctattggagttcaggtcccagtagcctgactacagcgctctggcttttcttcttttcttttttttattttttttgtttgtttgtttgtttgtttttgttttgggggggttgatttgttttgttttgttttgttttgttttgtttggctttttgagacagggtatctctgtctctgctaatggccctggctgtcctggaacttgctctacaaatcatgctggccttgaactcacagagatccagctgcctctgcctcccaaaggctgggatttaaaggtgtgcaccactatgcccagccagagctctgactcttacatggcaaaaaggggaaaagtcagattttctgttctttctctaaactgtctgtctgacacttgaggatagtttaagaacagattagtctatgccgggagacttctgcccctgggttctgaggagggtgtctctggtgttctggggtctgatggtatttagtgaccgtagtcagggccctgtggttgcttctgtgacttagcctggcaaagaccggacaggcctccagaagcaacctgataaaagacctaccctgctaaataacccagtgctacctgcctcaagggaagtccacttattctgtgcctgcccatgcctgagaaagccaggtcccttctccatgggagtagggctggggctagatgtaggctgtgcagaaaagcttgcttctggtatgctgaaccttgggaggtatgaaactctgacccactctccttccacatacttctgtgccaggcctagagcctttgagtgtgtgcttatctttacaggcatttgcagcccagtgtgacgcctgtgactcctccttctggtctagggtctcctaggaaatgtcctgagtgctctttgctttggtcagccctgggcaatgctcccaagctgttcactgagctatggctttcttaggatgttggtttctccctttgcaaatggctgctctctgttgcactcctagggttcatggggtccactaccatctgtgtgagaccaagcaggctttcctccccctcctttgcttagcaccaccctcagcccccacccttgttcctgctgctcttgctgtctgagcctgctcaggtatcctagaaacaagaaaagaaacaaaactccgaatcctcccagaggcctagtagcagctatcaaaccaaaacaaaattttctgagaggaaatgaaacagcacagtgaagggggtggggggcagcacatgtgtcagtcaggcagcggtgggtggggtctgagtgaacatggcctcagtttcatgacccatcagtttcagtggatcttgtttctcttctccagagcttttcctgagctattgttgtcccacaggaagcccacccctcacctgtcttacttgaagcttcctgtattagttactgtctccttgctgtgacaacttggtgccctcgaactatgagccaaaatcacaccccccccccttctttctcaaagcatggcagtaagagcatgaggccgccaggcacacggcacccatgcttgggaggcagcggtggtgctggtgctcagcttgcgctctcctttctgtctggtccgccccagccgacagaatggtactgcttacaatgccagctaacccagtttagaaacgccctcccagacatctgtagagttttgtctcctacacgattatagattatgattatatcttgtctaattggcaatattacccatcacatcccttacctcagggtgccaatgcaatcctcatgtcctctctttgagagacctagtttggttgaaccctcttagttgagctggtcctcccccgcccccagctggctccatagttcctttgtctctttggtctggttggccttgccctcccacacctcgaccctgcatgcactggcagtgtaccttggtgagcgctctgaacagagctgcttttcaaccactggggtaggaagtgcgaagagactggacctttctagcagtaagaggaagtgccttgctttttcagtggtgaaaagaggaaaattcctttcctgagtgtgcccttattgggatttatgctgaaatcccagcattatcaagcagcctgagaactagatccttgaacttgttacccgatggaatcgtatacagaaacacgtactcaccagcagcctctgtcttaccttctgttgtgtatttctaacatcaagtcagggcttttagttcttcccgtaacagtttgctaactgacttatttgttcatttggtcagcagtttattaaacaacctgctccgcttagtcatgcttagacaccagggatatagcagtaaacaggagagaccggtcactcatattgtgaagtttaggagcaaggagtgtgagcaggcaataagcatgcaaacaaattagtgagcaagggaggatcagagagtttaggtgctctgaacagtcagggagatgggagagacagcacataaggaaccaggagcttaagaggatgctagtgttagattaggtgggtggggcgctggagagatgctcagtggttaacagcacttgctgctcttgtaaaagacctgggttttgttcctagcgcctgcataatggctcacaactgtctacttccagttccagggaatccagtgccctcatctggcccctgcaggttccaagtaggcatgtggtgcatatgcatacatgcaggcaaatattcacatgcataaaattaaaaaataaaatgagaaaattgtgtggtcagggctccatggggagtaccagaactgatagtagcatgacagaagatagcagtgtgtgagctttgatgctgctgtgtttcacatggaggacatgtcaagtgcagagcctctaaggaagagaagaggtatttcattagcagaaccagtcagctagtgactaatctagagtgagtgagaagatgggagctcagaaaacattgttatgtttttaaatcttgctgcttataaggatttgcctcttgttggggaaagaaatgtctgtggaattgttggagagatagttctgtccacatttaaccttttttcatgtcttaaaaacatgttttcccaagccgggcatggtggtgcacgcctttaatcccagcacttggaatgcagaggcaggcggatttctgagttcaaggccagcctggtctacagagtgagttccaggataaccagggctatacagagaaactctgtctcgaaaaataaaaaacaaaacaaaacgtgttttcccatgtttttgaggaggggattgtaactaccccataaacaggcattactgggtctcgtaggcgatagcctaagcgggttatttggaaggcactgaattctaggtacctcaagaggacaacaagcaggggattccccagttaacacatcagcctctttctctcttggaataattaaagctataagattcctgttttggaagcaaactggcatcatagtctataattcagcttctggtaacactagaactcattggtttgtagaaagtgttgtgtggtatgctgtacactggagcttcctgtcacaaaagctaacttcctggtggccttttcttggtacccttccagaagattgccaagtaactgtgttcattacctctgtcattgctaaaataaaatacccggcaaggcaatgtctgggtctgttttggctcatatctgagagtatagttcaaaatagagaggaggctgtggtgacaggggtggtgggacacacagagagatggatgctggcagtgactcattttctcctttagtctggggctcaagcccatgagatggtgccatttacattcagggtaggcttcctctacttaattaaacctttttgaaaacatccccatagtcactctaaggagcagtcattgcctgttaccatggtgattctaaacctgtcaagttgacaagataaaccatcacaactctacctcttaatcatcttatcactcaaacacatcatttcaataacattccaacacgacacctcaaatctcattttcatctcagatttcaaaaatacgttgtctatctccaaacatctctcagtctttaacagtcttaatattaatactcttcagaaattcaaagtacattgttagactcaagacagtctcttaactatgagccctttaaaataaaacaatttccatatttctaatataatagggctcagaacaaatattcctgttgcaaaagggaagaatgggagcagagaaagtatagacctcccagcaggaccaaagcccaggagtgcaaacaccaagccctgcagggccctggcatgtgggcctcagcacatggacctctgatggagtcgcttgggcaacttgtctcttgagctctgctgctgcagtgcacatagattctgttgggtcaccttcactccatgtctggtagatatcacttagccttagcatcctcaaaatcctaggttgttcattggaatttaggcttcatttttcccagcgtcacacagtggtctcttcaggaccctagcattgccacacattgcttgcattagtggctttctggagccttggaggaagcctcccgttcccactcacctttgcatcttttgttcatgcctgcacacccaagaccagagggaccatgctgccaggttcctctactagtgtgagaggtagcttgcccaggcctcccaccatagctgcagcatcctctgtgtgcctgaggctcatcctgggaaaaacgtttccattacctgcactgctgctggtcctttagtgggcgagttctttctctcaggttcctttgctaatgttcacggcacagcaggacattctgtaaccattttagctgctttctctgcattcacaacttaaactctcttacgttctttttccccactgcacctttctttctgccttaattgcttttctctcattgcagatctggatcagagcagtgagcagtaagcttgacacacctgtcttattagtattcgtgtgtcttgactaagactattcttctgcaagacaaactagtccattacttttgaattcaggtgcaatcaaattctcaggatttgagcaaaatgaagcaaggttctttgccaaaatatagcacaaataatacagcccagttactgagacagtcctcgtaccccttgaaacctcatgagctaggccatgaccgccatattctcagcgttttgatcttccaaactcccaccagactggtctaataagctctgcttacagcaaaccagggcttctctagcctacagctccatacactcttccacattcctcaggctgaccagttccaaagaccttttgaaccatttaagtttcatcataacaaccccttttcccagtttgcttcattagttactgtggtgctttgaataagaatagcttccatagcctcttacgtttgaatgcttagctaccagggagtggaactgttggaaatgattaggaggtgtggactagttggaggctgtatgtcactttgggtggactttgaggcccagtctctctctgcctgtgggtcaggatgtagctctcagctacttccccagtgctatgatgatgatggactaaccctctgaagctgtaaacaagccccagtgaaatgctttcttttataaaagtagccttggtcatgtgtctcttcaccaccatagaacagtgactacaacagctactcttcttgttgctgtgacagaatccctgataaaagcagtttaaagaaggaagctgccgggcggtggtggcgcatgcctttaatcccagcacttgggagacagaggcaggcggatatctgagtttgaggccagcctggtctagagtgagttctaggacagccagggctatacagagaaaccatgtcttgaaaaagccaaaaataaagagagagagagagagagagagagagagaaagacagacagacagacagaaggaagcttgggctggtgatatggctcagtgggtaagggcactgactgctcttctgaaggtcctgagttcaaatcccacaactacatggtggctcacaaccacccataatgagatctgacgccctcttctggtacatctgaagtcagctacagtgaacttatgtataataataaataaatctttttttaaaaaaagaaggaagcttattttgggcgtattttggttgaagcagaagcccaccatggctgggaagtcacagtgccaggggtgaggtagctgtgcacatcgcatcagagacacgaaactcccgctcagcttcctttcttcttcttattcaactcaggacctcagcttgtcgctttgtggcatctgccctactcagttaaaccattttggatactcacagacatgcccaggggtacgttagtgccattctaggaaagcctgggaagtagacagtaaaacacagtgaccaccgtgctgtcatgtcggtgtgcacagggctctgagaggctctgtgacgctccttctactttacggatgagaaggaggagaccgaggttttcgaaaggaaagaaacaagttcaaggccagatagtatattagcagacagacctacctgaccacagtgatcttcatcttcctcccagtgcattgcccttgggcgtcagggagggagttatggctgtaacatgggggagccatgggcctgccctgcagctctgaatcatagctctcaaggtttgcagctgagcttggaggtcttagtgatttagtttgtgttcgctctttctttctttctttctttctttcttccttccttccttccttccttccttccttccttccttcctttctttctttctttctttctttctttctttctttctttctgcctgcctttcttccttccttccttccttccttccttccttccttccttccttccttccttccttccttccttccctctcaagctctcatgtattccacactggcctcaaactcactatgtagcccttaaacttctgatcctcctgcctccacgttctgagtgttgagaatataggcatgtaccaccacacatgctcggtttattaatgacttaaagctttatttataccttccaaaaatctcgagtaccagtcttcctggagctggggacttaacagtaaacaacacacaaaaatagaatctctgctgagttagatctgtcgtgctaggcactcctctcaaagcatattatgtaaagatggaaagttgctacatgctttggagaaggagttggccatggtggtaaagcgcagtaaagaatgtgagaagtgacagttaataaaggactagaggctggcattgagtcatggagggactttcactgcgcctccctgttgcccttctgatttcacttagcctgaaggaaatctgaagacacattgtttctggttgaccctcccgggcctgcccatgtgtttgcctctctactccgtggctcctgattgtcctttggctttgactctggaggctggagagtggtaggagatggctcctgtgagagagaaggaagcaagcctgggcctgtgcagggatgggaatgcagagggcttggcccttcctggcgctggtgtcccacagcatgactctcctaaactgaggccctaagggactgaggccttaccctccctctgtaaagatgagcgatctctctgtgccctcaagttctaagttacaagagtcagcctgttgcgccagcccaacccagcagtctttgttgatgatttcagtgaatattgctgcaagggcttaccctgctgggcaaggacattggaagtgaagggccaatgactgatgccagttgtgtcccaccctcctctccctagatgcctgtaggccctcttgtttacttggaaggacatgggcacagctcttcatagagaaatacatatgtgctttttctctctgaggggttgttttccagtctgaataaatctgggtaaaaagtttaaaggccttaccctgtgtatttccatccctgccatgccagataatttcctggcatgagacaaggggaggaaaaggaggtggagtagggtttgctcatctacctgtagccagtcatctttctgcctgcattgtgtatacacacataaacatacacacacacacacacacacacacacactcacacatatacacttaaacatatactcatacacacacacacacaaaaacgcacacttatacacacattcacacacacacacatatacacacacacacacacacagtgttgtgtgaacttgaacttaggagatggaggaaacataagaaattgtattccatgaagacttgaaaggttttcttgttttgtttataacaggattatatacagcccaggctgacctcacatccactatgcagctgaaaatgactgaactcctgaccctcctgcctccacctcccaagtgctgtgattatatgtgtgtgccaccagaacaagttaaaggccactgtgctgctttagggtgacagacttcagggaacactcacaggcagggaccacaacatgaagttgttctgcatttagaccatagctggtgtcattgtgtcaccaatgcatttagaggaagtctgtcgcagagagtggaagccctttgcccttgttcatccgtttctagtcaggaagctagtagcctctaaggtcagaccagccagccgcctttactagagctcagcctgtagaggactcgtcacaggtcaacagagattgggagaaggttcagaaaacagcagccacagaaaactctgtgggttctaaatagatgatggcaggcctagaggatattattctgcacatagtaagcagcctttgaattgtaagtgatgtgcactttcatgtatgctttcatagactgttcagaagtgacaggatacaaggtttccagagcccttgctttagtcatgtttcatgtttggggcaaggttttactttgtagctcagtcttgctttgaactcaatatattgtacattgcatatttgaagaatcaagacttcgttcttcagcctaccaaatgctgatatgacaggtatgcccctaaacatggcttttgtcatatctaagaccctcctgaccatggcattttaaagggaaattcaggagatcagaacttgaggtaagaagtgaaaagaaagccaggcagttgtggcgcacgcctttaatcccagcacttgggaggcagaggcaggcggatttctgagttggaggccagcctggtctacaaagtgagttccaggacagacacagctacatagagaaatcctgtctcgaaaaaccaaaaaaaaaaaaaaaaaaaaaaaaaaaaagagagagagaagtgaagtgaaaagagaaaggaataaggaatggggcaaagggatcaggaaagagtgggattgggggtaaaaggaagaaaaccactgaggaacagctggtcgggcagggcagttagtggtgatgagacctaagactgtctgttggtcagctggaagttctggatgtgtttggtcccatcaaaagtctagtgtccccagggaatatgtgggctctgtatattggattcatttactgagcctgagatgctaagtacggattatcaatatgcacctctacctagtttccactgcagtctgtgctctttcttcttccactctatggtatggcagcctccaggcttgctcttgtctgctgttccaccggtaagaggttaggcagccagacaacaggcctggtgcctgctcatcaccacagagcctgcctcgagcactgtctggcccttgacctgtagcttactgctgctgattctggccattcagcttccctcgccagagctgctcaggacagtctgtctggattcgatcccaactggacgcctgttgccttcgaggaaaagttgctcagcccttttttgtgaactaggacaaacctttacttgtcttgctctagtggccagaaagccctgcttaggccctgaagctaggggtcctttggctcagttggaagctttgtagccttcccaagtcattcccaaggtcctcccaagctatctctgctccctccacctccagcttaggcctccttgcagttctagcccctagcatagcccgtgtgttctttcttactcagtaggtagaagcataccatctctaacagtgattaagacatgtggctccaagcctgagaaccagttgcaagctgaggcctgagctgatcaaatcacattaactcttccatcttccattcattccttgggatatgttcaaaggctgggggaaggccctgtctctgctgtcctttaggagtatgatcagagatgggactgacagtcagggtcctggtgactaggcttctggtggagagcctttctattacgggaatctgataataggcccttttgggtggagactccgacctgttccctctgctgggtgaccagaagtctcagtgggctcctgaggaagctatggttcagtgtgacatctcactcatctcctcaggtgtgtggtcgtcctcttcaatccccggaagcacaaacagcaccacatcctcaacagctccaggtgtgtgggcctggcctcaggggctgggggtgaccgtggccgggggcctgaggccctgtggccagatagggacgtgcatatacactcttgagtttgttggccttgcctttgggaaatatgcatgaaggatggaggaagggaggttggggaagggggcacagtctagggtcaaccaaacctgccccatctcttgtaggaaaaccattactgcccttgccttctcccctgatggcaagtacttggtcactggagaggtaagtgaagaacagggtggcaatattgtggcttatggacaccctgccttcaaccaaagccaccgtcctgtgttccagctagggtgctgtcactttggcttcagggattgataccctggtttctgctttgtccagatagctgttcttaagctttagtgtgatcaggctccctgggagggcttttcaaagtgctcacagctaggctcctactccaaagttgtttgattctataaccttcttttaaaagtaaaaccaagcccgggtggtggcgcacgcctttaatcccagcacttgggaggcagagccaggtggatttctgagttcgaggccagcctggtctacaaagtgagttccaggacagccagggctacacagagaaaccctatctcaaaaaacaaaacaacaacaaaaaagtaaaaccaaaacaagaaatattaattaatttctttatgtgggggaggggtcatgaaggttatgtcaaatgctttatactctgaagtcatctcttgcctcctttccccccggagcttctaacaatgtggggtagttaaggacacatttatcctaaaatattcctatcttcagatgccccctgctgggcacacgaggaacacggcccttggttttacaaggaggcagtcagggtagatgcctgctgctgcttgctagaaccattcaaggagctttgaccagacagaggcaagggctagcctctgctgacactggtgtcctcagatcctttttctatgcctttatcttgctctcccctgttgaacactggaggaacagtgtttaaagctggggaggtgagagactaaggaggctacacataacaccttccacaattctcacgtgcggttttgcctccctgcagagtgggcacatgcctgccgtgcgggtttgggatgtggctgaacgtagccaggtggcagagctacaggagcataagtatggtgtggcttgtgtggctttctccccaagtgccaagtacattgtgtctgtgggctaccagcatgacatgattgtcaacgtgtgggcctggaaggtgagtaggctggtgacagccttagcggcctcatgagggttcccatgggggtggagggggaactgctgacccgagcaacctcatttccttcactgtctccagctcttccttgaacagtatttgaagtacaaaatagcacctgaggagcaagggtgtttctagaggcttttcctgcacatctaaggaattaaacctttgaattcctttagaaaagaggttgggtttttgttgttattgttttgttttctgaccattaaataccagaaaggaagagttttgtttttcctctctttctgttgttgttttgtttgtttgtttgtatttgtttttattttggggtttttttttgtttttgaagtagaaattattgctagctcttgtccattctcagataccttcttaccccagtaggaagagcttgtctgttctcggataccttcttatccccaacaggcagaactttgattcttcctctggcttcccctccagaaaaacattgtagtggcctccaacaaagtatccagtcgggtaaccgcagtgtccttttctgaagactgcagctactttgtcactgcaggcaaccggcacatcaaattctggtacctggatgacagtaagacctcaaaggtgagggctgagatgaccaaccctgaacagcactccagctgttgcctttggcttgtttaacagtcacaggttcttcatggacctgacctgcctgggctgaggcgtctcaaagaacacatgcttgccctctctctgaggccctcatttccaaggctagatggctgtagtggtgtctccacaggtgaacgccactgtgcccctgctgggccgctcggggctgctgggggagctgaggaacaacctgttcactgatgtggcctgtggccgaggggaaaaggctgatagcactttctgtatcacgtcgtcggggctgctgtgcgagttcagcgatcgcaggcttctggacaaatgggtggagctaagggtaagtaactctggctccagaacagggtctggccttatctcaaatcaggggagaactggccttggggctgtagagccaggctgggcctttgtgcatgctgaaggggactgcaggagaagactcagggtgctcgcttgcagtgatctgcataaccagctcctcttgctctttctcgcctctcttccctgctttcctcttctgctcagaacacagacagcttcacagtaagtgcttctaggccttctcttctcaagctgttgctttctcctcgttggggtttttctaccttccaatcttggtccctctgatggccttgatttctaccccacctcccaagtctgcagggctacaggccctctgaccatatgctgctggagggagggcatttctagatgacacctgacgggttggcccgactttggcctggctctcctttgtgagcgagtgttgctgagggcttgggaaggattaagccaagctaaatgggaagatggcccttacttactgagctgctctgcccacagaccactgtggcccactgcatctctgtcacccaagaatacatcttctgtggctgtgctgatggcacggtgcgccttttcaatccttccaacctgcacttcctcagtaccctacccagaccccatgctcttggaacagacattgccagcatcactgaggccaggtgagctatatggggcccactgtccattcaaagctttagtcactacttcatggagcagaatggagagtgtgcaatgcccagagatcccctttgtagacagaaacctgggtttcttggtagttgtcagaatcggggagattaaatagcacagaggaccatggactgtgtcacctgggtgcatcttaggcggttttaagaatgactcaagggattggagtcttccttctggttggcctcttgataagctgtcagcaccagaaagaaagtatgctgtggtaaagacacagaaagacaaagtcaccaatcatgacacagaaagtcaccaatcatgacacagaaagtcaccaatcatgctaggaggaaaagggggttgtgtggtcatttttatggtttggcaagtgtcctcagtaaaagatgaggaggaggaagaggaggaagaagaagaagagggggagggggaggaagaggaggaagaagaggaagaagagaaagaggaggaggagattttgaggtgctggagatagtacccagagccttgcttgttagataagtgctctaccactgagctatatcacaaaccctatttttgtggtatgtagtatagtcttgttttgatctctgtgcagaaatacccatagaaccatgtagattttgttgtgctccattgtaaccacagaattgccttgtctggtattggtgatctatgaatttgttagcatttctctggaaaacactctgcccagtagctggggttgggtgagctcctggattggatctctaggcactgcttttgaattctcagttctacttccaaatctgtaggactggagacagtgtcctgtgctccattccttcctttgtggtaacttcctgtcctctctcccacagtcgcctcttttctggaggggtcaatgcaaggtacccagacaccattgccttgaccttcgatccaactaatcagtggctatcttgtgtatacaacgaccacagcatatatgtttgggatgtgagggaccccaagaaagtggggaaggtgtactccgctctgtatcactcctcctgtgtctggagtgtggaggtacgtgggatgggtttgcagtaattccactgtgagaatagaaagcagagaacaccaagcacggccctagggtcctgcccctcggctctcagtggcttccctgctgtagctctagagctgtccagtgtgaacattggtgcccatgcacctcagccttcttgtgtgtctctgcctagcctgagtctttgccttatcctcggctcaggaatcttggataagttactaaaccagactaagcttcagatcccttaactgtaaaatgatgtatcagattttcccaattgttctaacaatgaaatgacataacgtaattgagagattatggcacacaggaggagctgggatctcgggcttttccttactgggtgcatatataacagtaatgtctcatttccttactaaatgtcagacaatagctaagtcttagcactctgccttggatgccataaccctttccttcttcctgagtagacaaaaatgccccccaaagcggaagtctaattctctccctctgtcccttcaggtctaccctgagatcaaggacagtcaccaggcctgtcttccccccagttcctttattacttgctcctcagacaacaccatccgcctgtggaacacagagagctctggggtacatggctctaccctgcaccgtaacatcctcagcaatgtgagcctcccgtttcatacttatgcccccatgcttatagattttgaccttgttttcaggaactggctccccgaatcttgatcattcagcttctatttggctggactctctgagccaagggttgattttacccagcatccctctgtgcttgcagccatcctgctggtactgcctgagctgtctcctttctcctttcccaccaggatctcattaagatcatctatgtggatgggaacactcaggctttgttggacactgagctgcctggaggagacaaagctgatgggtcgctgatggacccccgagtgggcatccggtccgtgtgtattagccccaatggacagcacctggcctcgggagaccgcatggggacacttaggtaaggtcaagttctgagctaggtactgactgcctctcatggtgactgtggtagttagatcctcaagagcagcgctttaggagggcttgtctccccccaaagcttagaaacaagatatttattctgtaaaatgaaagaatgagcttacagtggtgagctcagaaaaagccatcgcagacataggcacagctatcagtcacacatccgcatgaggaaactcaagataaggggttctaagaaggacataatattgtttctgtggtgttctttaaaaaaatgcatataactcagttcacttgtgagaggctcaaatgaggtacatacaagagagtaattgtcagtgttcttcaaaagtgtcgaggacatggaaggtaaggagggatggagagactaccacagacttcaggaaactaaagagcagtgatagctaaatgccttttacattctttaagatcctgaatccaggacatatggacaaataatggcatgttaataatatacctacttgggctggtgagacggttcagcggttaagagcaccgactgctcttccaaaagtcctgagttcaaatcccagcaaccacatggtggctcacaaccatccataacaaaaatctgatgccctcttctggagtgtctgaagatagctacagcgtatacacatataataaataaattaattaattaaaaaaaataataatatacctacttaacagtatgtaaatgcctggctctgacatgtgctgttgttatgtatgctagttaagaactgggcaaggggatatagaacaccttcagtgtttgaactttttcttaaagctttaaaatgtttgtttaaaggtggggagaggatgtaacagaagaaggaggcctttcctctcacagccaggcaatgatgtctcttatttgtaggatacatgaactgcagtccctgagtgagatgctgaaagtggaggcccacgactctgagatcttgtgtctggagtactctaagccagacacaggtaaggcctaacccatgccctagcagggtctagctctggcacagcccctcctgtcctgccagtgccaccttatacctgccttggcttctgataatcttgggtcctatattcattcagatcacttggtgtttgcaggattgtaagatctctgtccctgttctgtggttcatgtggctttagggatatgaggctctgtctacttggggctctttcccaggcactgataagggccagcttaatgtgaactgataagattcttccaaccccaggtttgaaactgctagcatcggcaagccgggaccgtctgatccacgtgctggatgctggccgggaatatagtctacagcagacactggatgagcattcatcttccatcactgctgtcaagtttgcaggtggggactgggcaattgaagctattcatccctctacctaccacctacatttatgagaagagtctgctgggaaggattgggaggtacccgggagtcatgaggctaggtaggaaggcaggtgaaatatagactttcagtctaggggaccctgagccagactgagggctgaggagggggtgcatgggttttgtgggatgcactctgttttatttggttggtccaccatgtagagtagctccattggggaaaataagggaaggcaggagaaaggctgccttcatatggtggaagcagccaggtccctgtcccctacagccagtgatgggcaagtgcgaatgatcagctgtggtgcagacaagagcatttacttccgaactgcacagaaggtaagggcactgggtgtccccagcagggcaggggtgggaacagggtttcaggctatgggaggtgaagagagaagtgagccctgtgagctgtgatgcatttgcagtctggagaaggagtacagtttacacgaacgcaccacgtggtacggaagacaactctctatgacatggatgtggagcccagctggaagtacacggccatcggctgccaagaccggaatattcggtgggtgggcgttcccttctcagacttctttacaaattcattttcactttgtttattttgtgggaagaggattgagcccgtgggggtcaggactactttcaggagtggtttgtctcttaccaggacatgggttctggaggtcagacttagccatcagtccaggcagcaagcgcctttatcctctgagctatttttctggcctcctcttgtcagatttttggaccacattcctttgtgcagctcagtctcaaatctgcttttttgtccaggctttcgagcctctttgaggcagcaaagtactctgcctcacctgagagagtgcgagcgagttcccaggacaaatgggaagtcccatttgctgccagcttatagcctgggctctggtcctcaggctgctgtgaacacgtgccttccttttcaggatctttaacattagcagcggaaagcagaaaaagctgtttaaagggtcacagggtgaagatggcactctcattaaggtgagcaccccagtgggactagcagagcctgctgcctgccctgccattgggcagcttgggggcggtgctaagtgaggaggggtggtgatcccctactcttgctgtgtccccaggtgcagacagacccctcagggatctacattgccactagctgttccgataagaatctctccatttttgacttctcctcaggcgagtgtgtggccaccatgtttggccactcaggtgagtgagtgagtgtagcagccacctccctagttgaaattgtactttcttcccttggctgttgccacaccacaactctgccctaccctgggaggcatcacctgactaaagcaagagtagaaagccctgtggcagaaggggacagtatggttggtacctttcccttcccccacatccagactcagagcacaaagtgcctatgtgaggatagaacccgactctccctctcctgcagccagtgcccatccctgcagctggaagaggcaggaatttgattaggtctttgtggcagttcatagaccatatactttactttttacagagattgtcactggcatgaaatttagtaacgattgcaaacatctcatctctgtgtcaggggacaggtgagcagaagctaacttccctgagacaattcttctctgtgccacctgtccctcctctcattttctctcctggtgtctctgggaagtaggtctgaagagggacatttcttggtggggcctgacctggcagtggagggtggcttggatcgccttgccaattcgtgggaagtaggaataaacggtgctgctacccgcagagtccttccctgcccctcactcagcgttgtggctccaccctagctgcatctttgtctggcgtctgagctctgagatgaccatcagcatgaggcagcgcctggctgagctgcggcagcgccagcgagggatcaagcagcaaggaccaacgtctccccagagggcttctggagccaagcagtaagtgggccagagatgggctctgctcacggttgtgcacagggtgtgtctccccagagggcttctggagccaagcagtaagtgggccagagatgggctctgctcacggttgtgcacagggtgtgtgctctccctgcacctcctcgtgtggaacgtactgttcggcatctccagtaatctcaaggccttcctttgcatgcacaagcccatcagtgttgccttcttgcccagtgagtcttctcttctgaccttcttgtcttggactcaggcaccatgctccagtggtacccccttctggaccagctctttcctcagacagtgacaaggagggagaagatgagggtactgaagaagaagaattgccagctctgcccatccttagcaagagcaccaagaaagaactaggtttgtggcagttaggtgtaaagcagacaggcaccagctgctgtggtgactaggttagcccatctggaccatgggataaggaggctgggccatcacagtgatcacatgggggatggggatgttctgggctcctggtcccagaggtgggcagggaggaaacacaccttctgactgcctatttctgtctagcctcaggctctagtccagccttgctccgaagcctgtcccactgggaaatgagtcgggtaagttgccatcactgaaatgtgcttctaagattattagacgtgagggatgaggcattgggtaaggacctgcccacatgcaccattcctgtttccaaggaaggccttatcattaaggtcaggcagcgggtctagtcggggataagggagcgagcatcagttttccttcttgtatcagatgaggttgcctccactagaggaggtcccacctcctcatctgccaggagcctgggagaagtaccattcaagagtagcttggttttgttttgagtcagagtctcactgtgcagccctggctgacctggaactcagggagatccacagggccttagctctgagtgctgagaagaaaggccttgccaccacactgtgcttaatccaaactaaaccacagcagcaacaaagcagcagcgtgcagtgaggagtaatggtgtgagtcacatgttagagcaacagcccagggagagcaaggctccagcaaggagaaacctagggaactctagctctgaagaccccaatgaggaagttagtacagagcagtcagagggaaaggctgcaggaatacctgttgctgtgtgggtatttcagagtgccagcgaaggagagacattttcagcaagccccaaagcagcccaaccctcacatgtcccaagttggacttttgagtctagcactctgtgttgttggtagcagccgcacagagtggcctcatcagggtctcagtccctcattgttggtttggccttagtgctaagatgggactctgggttctgttgggtatcttcagagaacagaattatttaagagtcctagctctagactgtaagacaccagataaaggcagaaactaaagaggttcctattatgaggtctagaatgcagctccgagtatgcactctatagagctaaccttgcctgcaggccacttaaggtcccacatggacgtgggctactcacagaaatccactgtgcttctgtttccatcgtgtgtaagacctgggataataatgctacctactctataaaatgactgtaaagataaaatgagctaatacacagagggtggcgttcatgccgacaatatgtacatatgtttgtttgctgatagtataattctaattagtactccttttttgccacaaccaccaggcacaagagaccatggagtacctggacccagctcctgtagctaacacaggacctaaaagaagagggcgctgggctcagccaggcgtggagctgagtgttcgctccatgttggacctgagacagatagagaccttagccccaagccctcgaggccccagccaggactcactggctgtgtccccagctggtcctgggaagcatggtccacaggcccctgagctgtcatgtgtcagtcaggtgagctatctttctcctagctctctagaggtctcaggaagcctcagccagtcctgtgctaacagccggggcctgcgcttaggtacttctgtgcacagaagacacagagacaggaagtctctgtggcaggtggctcatctgaaatgtagttgtagtagaactgactgggctgtattgtgagtggggtgggccgagaggtacagggagctttggggaggactcttggtgttgagtagcaagagcctggcagtctgagtgccaaaacagctcttccagaggcttagtattccagctgagcccagcctggcctcctgcttcctgtccccagagctacaacactctgcttccgcagcactgctgttcaccaacaccttcttctcacgccagcaatcctcacaagtatccctttctttatgtgtttccagaatgaaagggcccctcggcttcagacctcccaaccctgctcctgcccccacattatccaattgttgtcacaagaggaaggagtctttgcccaagatctggagcctgcacccattgaagatggtattgtctacccggaacccagtgacagccctaccatggataccaggcaagggttgtgccctggccagaactcatgggctctgcggcccttacacttcctttccctttgagttttctttcgtgggcagtggttggcctccaggccaccacctccctagcagtgttcacaggcaggagctgagtggagctgctgacccctgctcactgtctttccttcctttgctggcctttccggcagtgcgtttcaggtgcaggctccaaccggaggatccctaggaagaatgtacccaggcagcaggggctcagaaaagcacagtcctgacagtgcatgctctgtggattacagcagcagccggctttccagccctgaacaccctaatgaaggtaaggctgtaccatgaggaagggacaacggggtgaagcagggaaggcagacctgtgaccgataggtacagtgtgatgcctttcccctcccccccatccagactctgagagcacagagcccctaagtgtggatggcatctcctcagacctggaagagccagccgagggtgatgaagacgaggaagaagagggaggcactggcctctgtgggctacaggaaggcggccctcgtaccccagatcaggaacagtttctaaaacagcactttgagactctggccaatgggactgctccaggtgtggtctgtgggccagccttcagtcagccacatctgcccttgtcccctagctgagaaggagggtccagtaggcagtgccttaggttgctttgtaggggctgcaaagacctcgggcaagaactaaacttctgactcagttcatggtttctgtgcctcctgcagggggcccagcacgggtgctagagaggacagagtctcggagcatctcatcacgattccttctgcaagtgcagacctccccactcaggtacggaccaccccacatggctctgctcacctggtgctcctgcacctggcacagcatgtagccttcctcacatctctccagaaggggacgttgtactcccagatttgaagcaggtggtctcacgcagactctgtcttgctttgtgcttgtcctctcctggtgcatctctgtctgtgagggcatctggccagctcagggaggaaagcactgagccttctctgggccttcttctgaacccattctccctgtagggaaccatccctatcctcctcaggcttggccctgacgtccagacctgaccaggtatcacaggtgtctggtgagcagctgaaaggcagtggtgccactcctccaggagcacccccagaaatggaaccctcttctggcaactctggccccaagcaggtggctcctgtgctgttgacacgacggcgtaacaacttggacaacagctgggcctccaagaaaatggctgcaacccggcctttagctggactccagaaagcccagtctgtgcatagtttggtaccacagggtaaggaaccttgatgagttcaactacaggttgtgggggatgtgagacatgtatgtgggcatgctggaggaaggtgggtctagtgtggccctggcatgtcaccatgcttgccactgcatgtcccttagtgattacacacaggggagagtagcaactggggactgagccctagcatttgcacactttcctcaccacgcgacctgcatctgtccctgtccccaatgcagatgaggtgccttcatcacgtccactgctcttccgggaggcagagacccagggcagcttaggatccctgccacaagctggtggctgctcatctcagccccactcctaccagaaccacaccaccagttctatggccaagctagcgcgtagtatttctgttggcgagaatccgggcctggcaactgaacctcaagctcctgcaccgatccgaatctcaccattcaacaaactagctctgcctagcagggctcaccttgtcctggacatccccaaaccacttcctgaccgtcctactctgaccacattctcacctgtatccaagggcctggcccacaatgaaacagaacaatcgggccccttggtgagcctaggaaaggctcatactacagttgaaaagcactcctgtttaggggagggtactactcataaatctaggacagagtgccaggcttatcctggacccaaccacccctgtgcccagcaactgccagtcaacaaccttctccaaggccctgagagcttgcagcccctgtcccctgagaagactcgtaaccccgtggaaagcagcaggccaggggtagccctgagccaggactcaggtgtgcatggctccccagtctcacctggcccatcctttctgtctctgttggctactttctggctctgtcccatttctgtgtgcctggcctttggtgtttttgtcctgtctgctcctgtcttggtccataagtcacacctctgatggtgagacactcttgccacccttcataatctccctgtgacccagtgaaccctttagtctggatactagggctggcttttccttctaaactttgtgtggtgttggggaaggtgttggaagaaggtgggacaagaggccaggattgtcggctggtagggattatagctctgctctgagagccctgggttgggatgcctgaaaaagcagcagggcctcactggtgtttgtccttcagaactggccttgagtctgcaacagtgtgaacagctcgtggcagagctccaggggaatgtacgccaggcagtggagctctaccgagcggtgagtatggggcaaccactgtaggcaacaacagagcttcttctacacgctggatggagcactcaaaggtattccgagcattgtaaaggggagggtcagaagccaggccaggcctctcaaccccagaatctgttggttatttctaggcaagaaacagggtcgtagagtagaacaccatattattcaagaaaatcccaattcatggctgttatcttttttttatatcccaaaatggtttgggcactttagatagaagaaactatgtaactgtcacatttgaaagagttgttgggaaaagttgtcaagaagtagatggttctaatagtctggagggatcctcatctgggccacccatcagagtgactctggccatcctgatcttgtgtgtagaactcctaggcagtcccttctactgggtgggcaaggcactggcagagccccttttctatattccactgtctactactctccagctcactttcagtgttcctgtcgcaggtgaccagctgtaagacaccttcggcagagcaaagtcacatcacccgtctcctgagagacaccttctcttcggtgcgacaggagctcgaggttctggctggggcagtgctgtccagcccaggtggcagccctggggctgtgggggctgagcagacgcaggccctgttggagcaatactccgagctactgctaagagctgtggagcggcgcatggagcgcagactctgagttcctga

SEQ ID NO: 444 - DNA, 4687 bp, Mus Musculus
gaagacacctactgtgatgataaggttgcttctgccatctcaggccagtgaaagtgcatatccgaaggctgtgttgaacgagaaggcagtaccgctgttgagacaagtccaaaggctaggccagggactgtccttaggggctcctcgttatgatggctggagaagggtcaaccattactagccgtatcaagaacttgctgaggtctccatccatcaaattacgcagaagtaaagcaggaaaccggagagaggacctcagctccaaggtaaccttggagaaggtcctgggagtaacagtatctggaggaagaggacttgcttgtgacccccgatctggcttagttgcctacccagcagggtgtgtggtcgtcctcttcaatccccggaagcacaaacagcaccacatcctcaacagctccaggaaaaccattactgcccttgccttctcccctgatggcaagtacttggtcactggagagagtgggcacatgcctgccgtgcgggtttgggatgtggctgaacgtagccaggtggcagagctacaggagcataagtatggtgtggcttgtgtggctttctccccaagtgccaagtacattgtgtctgtgggctaccagcatgacatgattgtcaacgtgtgggcctggaagaaaaacattgtagtggcctccaacaaagtatccagtcgggtaaccgcagtgtccttttctgaagactgcagctactttgtcactgcaggcaaccggcacatcaaattctggtacctggatgacagtaagacctcaaaggtgaacgccactgtgcccctgctgggccgctcggggctgctgggggagctgaggaacaacctgttcactgatgtggcctgtggccgaggggaaaaggctgatagcactttctgtatcacgtcgtcggggctgctgtgcgagttcagcgatcgcaggcttctggacaaatgggtggagctaaggaacacagacagcttcacaaccactgtggcccactgcatctctgtcacccaagaatacatcttctgtggctgtgctgatggcacggtgcgccttttcaatccttccaacctgcacttcctcagtaccctacccagaccccatgctcttggaacagacattgccagcatcactgaggccagtcgcctcttttctggaggggtcaatgcaaggtacccagacaccattgccttgaccttcgatccaactaatcagtggctatcttgtgtatacaacgaccacagcatatatgtttgggatgtgagggaccccaagaaagtggggaaggtgtactccgctctgtatcactcctcctgtgtctggagtgtggaggtctaccctgagatcaaggacagtcaccaggcctgtcttccccccagttcctttattacttgctcctcagacaacaccatccgcctgtggaacacagagagctctggggtacatggctctaccctgcaccgtaacatcctcagcaatgatctcattaagatcatctatgtggatgggaacactcaggctttgttggacactgagctgcctggaggagacaaagctgatgggtcgctgatggacccccgagtgggcatccggtccgtgtgtattagccccaatggacagcacctggcctcgggagaccgcatggggacacttaggatacatgaactgcagtccctgagtgagatgctgaaagtggaggcccacgactctgagatcttgtgtctggagtactctaagccagacacaggtttgaaactgctagcatcggcaagccgggaccgtctgatccacgtgctggatgctggccgggaatatagtctacagcagacactggatgagcattcatcttccatcactgctgtcaagtttgcagccagtgatgggcaagtgcgaatgatcagctgtggtgcagacaagagcatttacttccgaactgcacagaagtctggagaaggagtacagtttacacgaacgcaccacgtggtacggaagacaactctctatgacatggatgtggagcccagctggaagtacacggccatcggctgccaagaccggaatattcggatctttaacattagcagcggaaagcagaaaaagctgtttaaagggtcacagggtgaagatggcactctcattaaggtgcagacagacccctcagggatctacattgccactagctgttccgataagaatctctccatttttgacttctcctcaggcgagtgtgtggccaccatgtttggccactcagagattgtcactggcatgaaatttagtaacgattgcaaacatctcatctctgtgtcaggggacagctgcatctttgtctggcgtctgagctctgagatgaccatcagcatgaggcagcgcctggctgagctgcggcagcgccagcgagggatcaagcagcaaggaccaacgtctccccagagggcttctggagccaagcagcaccatgctccagtggtacccccttctggaccagctctttcctcagacagtgacaaggagggagaagatgagggtactgaagaagaagaattgccagctctgcccatccttagcaagagcaccaagaaagaactagcctcaggctctagtccagccttgctccgaagcctgtcccactgggaaatgagtcgggcacaagagaccatggagtacctggacccagctcctgtagctaacacaggacctaaaagaagagggcgctgggctcagccaggcgtggagctgagtgttcgctccatgttggacctgagacagatagagaccttagccccaagccctcgaggccccagccaggactcactggctgtgtccccagctggtcctgggaagcatggtccacaggcccctgagctgtcatgtgtcagtcagaatgaaagggcccctcggcttcagacctcccaaccctgctcctgcccccacattatccaattgttgtcacaagaggaaggagtctttgcccaagatctggagcctgcacccattgaagatggtattgtctacccggaacccagtgacagccctaccatggataccagtgcgtttcaggtgcaggctccaaccggaggatccctaggaagaatgtacccaggcagcaggggctcagaaaagcacagtcctgacagtgcatgctctgtggattacagcagcagccggctttccagccctgaacaccctaatgaagactctgagagcacagagcccctaagtgtggatggcatctcctcagacctggaagagccagccgagggtgatgaagacgaggaagaagagggaggcactggcctctgtgggctacaggaaggcggccctcgtaccccagatcaggaacagtttctaaaacagcactttgagactctggccaatgggactgctccagggggcccagcacgggtgctagagaggacagagtctcggagcatctcatcacgattccttctgcaagtgcagacctccccactcagggaaccatccctatcctcctcaggcttggccctgacgtccagacctgaccaggtatcacaggtgtctggtgagcagctgaaaggcagtggtgccactcctccaggagcacccccagaaatggaaccctcttctggcaactctggccccaagcaggtggctcctgtgctgttgacacgacggcgtaacaacttggacaacagctgggcctccaagaaaatggctgcaacccggcctttagctggactccagaaagcccagtctgtgcatagtttggtaccacaggatgaggtgccttcatcacgtccactgctcttccgggaggcagagacccagggcagcttaggatccctgccacaagctggtggctgctcatctcagccccactcctaccagaaccacaccaccagttctatggccaagctagcgcgtagtatttctgttggcgagaatccgggcctggcaactgaacctcaagctcctgcaccgatccgaatctcaccattcaacaaactagctctgcctagcagggctcaccttgtcctggacatccccaaaccacttcctgaccgtcctactctgaccacattctcacctgtatccaagggcctggcccacaatgaaacagaacaatcgggccccttggtgagcctaggaaaggctcatactacagttgaaaagcactcctgtttaggggagggtactactcataaatctaggacagagtgccaggcttatcctggacccaaccacccctgtgcccagcaactgccagtcaacaaccttctccaaggccctgagagcttgcagcccctgtcccctgagaagactcgtaaccccgtggaaagcagcaggccaggggtagccctgagccaggactcagaactggccttgagtctgcaacagtgtgaacagctcgtggcagagctccaggggaatgtacgccaggcagtggagctctaccgagcggtgaccagctgtaagacaccttcggcagagcaaagtcacatcacccgtctcctgagagacaccttctcttcggtgcgacaggagctcgaggttctggctggggcagtgctgtccagcccaggtggcagccctggggctgtgggggctgagcagacgcaggccctgttggagcaatactccgagctactgctaagagctgtggagcggcgcatggagcgcagactctgagttcctga

SEQ ID NO: 445 - protein, 1509 aa, Mus Musculus
MMAGEGSTITSRIKNLLRSPSIKLRRSKAGNRREDLSSKVTLEKVLGVTVSGGRGLACDPRSGLVAYPAGCVVVLFNPRKHKQHHILNSSRKTITALAFSPDGKYLVTGESGHMPAVRVWDVAERSQVAELQEHKYGVACVAFSPSAKYIVSVGYQHDMIVNVWAWKKNIVVASNKVSSRVTAVSFSEDCSYFVTAGNRHIKFWYLDDSKTSKVNATVPLLGRSGLLGELRNNLFTDVACGRGEKADSTFCITSSGLLCEFSDRRLLDKWVELRNTDSFTTTVAHCISVTQEYIFCGCADGTVRLFNPSNLHFLSTLPRPHALGTDIASITEASRLFSGGVNARYPDTIALTFDPTNQWLSCVYNDHSIYVWDVRDPKKVGKVYSALYHSSCVWSVEVYPEIKDSHQACLPPSSFITCSSDNTIRLWNTESSGVHGSTLHRNILSNDLIKIIYVDGNTQALLDTELPGGDKADGSLMDPRVGIRSVCISPNGQHLASGDRMGTLRIHELQSLSEMLKVEAHDSEILCLEYSKPDTGLKLLASASRDRLIHVLDAGREYSLQQTLDEHSSSITAVKFAASDGQVRMISCGADKSIYFRTAQKSGEGVQFTRTHHVVRKTTLYDMDVEPSWKYTAIGCQDRNIRIFNISSGKQKKLFKGSQGEDGTLIKVQTDPSGIYIATSCSDKNLSIFDFSSGECVATMFGHSEIVTGMKFSNDCKHLISVSGDSCIFVWRLSSEMTISMRQRLAELRQRQRGIKQQGPTSPQRASGAKQHHAPVVPPSGPALSSDSDKEGEDEGTEEEELPALPILSKSTKKELASGSSPALLRSLSHWEMSRAQETMEYLDPAPVANTGPKRRGRWAQPGVELSVRSMLDLRQIETLAPSPRGPSQDSLAVSPAGPGKHGPQAPELSCVSQNERAPRLQTSQPCSCPHIIQLLSQEEGVFAQDLEPAPIEDGIVYPEPSDSPTMDTSAFQVQAPTGGSLGRMYPGSRGSEKHSPDSACSVDYSSSRLSSPEHPNEDSESTEPLSVDGISSDLEEPAEGDEDEEEEGGTGLCGLQEGGPRTPDQEQFLKQHFETLANGTAPGGPARVLERTESRSISSRFLLQVQTSPLREPSLSSSGLALTSRPDQVSQVSGEQLKGSGATPPGAPPEMEPSSGNSGPKQVAPVLLTRRRNNLDNSWASKKMAATRPLAGLQKAQSVHSLVPQDEVPSSRPLLFREAETQGSLGSLPQAGGCSSQPHSYQNHTTSSMAKLARSISVGENPGLATEPQAPAPIRISPFNKLALPSRAHLVLDIPKPLPDRPTLTTFSPVSKGLAHNETEQSGPLVSLGKAHTTVEKHSCLGEGTTHKSRTECQAYPGPNHPCAQQLPVNNLLQGPESLQPLSPEKTRNPVESSRPGVALSQDSELALSLQQCEQLVAELQGNVRQAVELYRAVTSCKTPSAEQSHITRLLRDTFSSVRQELEVLAGAVLSSPGGSPGAVGAEQTQALLEQYSELLLRAVERRMERRL

SEQ ID NO: 446 - DNA, 40376 bp, Mus Musculus
  misc_feature (1)...(40376): n = A,T,C or G
atgccaactgttattagtccaactgtggccccaaggacgggggctgagcccaggtccccagggccagttcctcacccagctcaaggcaagaccaccgaggctggaggtggacacccaagtggcatctattcggccatcattagccgcaattttccgatcatcggtgtgaaagagaagacatttgagcagctccgcaggaagtgcctagagaagaaagttctttatctagaccccgagttcccaccggatgagacctctctcttttacagtcagaagttccccatccagttcgtctggaagagacctccggtgagtagcttactggttttgtagctggctggagtttgcttcagagacgtcctcccactcagcacctccccaagcacagctgggcacatggacacggggaaggatcctggcaggggccagggctctggctgcaagtgcaaaaaggagaggacagggtcaagtctaagaaagtctaagaggacagggtcagggctgcttctctcacactttctcgctttctgctgttcatgaaagtaattagatcctaaatttatctttaaaatggccatcctttccccagaatcagtgccacggtggccagagctatactctctgcctcactatattgagacgtcttccatttctcaggctaaaatcatgagatgctgttctttttgttttggacatttgccagggaccgtggatttctgaaacacagaagccagggaaagaggagagaggcaaagactactttttataacataacattgagactagaagaatttttgcctttatacctcactgcataaattaggatgccaaaacccagcaatagactgagcatatgacagaacctgaatgaaaccctgcttgctagggacccaccagaagggaaattatgtttccctggctcccttctctcatagtgcctccaatgtgactcttgtttttgaaacaagaaacattttagtcacaaaacaatctggggctaggagtaacacttagtggtagagttctacttagcatgtcagaggccgcttgtgcaatctctggcactgctaaccagtcagtaaataaacataaaaaggggaagagagaaaaaataatcacagaaaagagggagaaatagatgttgcaggtccactagcttcacatactgggcaagttactaggaggagtgttgtgaacaagagaccacaacttacactgttgcgaagactagagtcttgaggagaatgtggacatttaggtccagtggtcaccaggactctgtcatcacagagtggatgggatcaaagagagcaggccaggtcaggggtgagaaacctttcacaaagaagtgatgctgggctcttcacaggattcattggccatgtttttctctatttactaactagagctgtctcctgtccccttctgctgtcctttggtaagtcccatccatggctgtcatgaatgtcctcagcttagaagagcaggctgcagtaggctgggtgtagctcagcacacacctaacatgtgtgaggtcccaagccaaggtggacaacccaagcaatgcgcttagacacactgtgccccccccaccccgctcagcccccactacctgcagcataagttcaaactgcctcactgagcacagcccttctcaagcagacccgtgcctgacctctcaccttcactctcttctctaaatgctgtagcggaacatctggctgcagtggaacatctggctgcagtgccctactagggtttggttgattggctctgccttgcattctctacttcaatgtcacttccctcaacttctctcacctctcctggtgctgagagcagggtctgtttgtggtcattcgtagaccctgtacatattctgaacataataatatacagatgctggtagcaaatgaatacccacatctaagggtctaacccaggacagccctgccttccaaagtagggaacccctagaagctttgtctaattgtactcaaggggcaaagggaccaaaacctacaaacactgtttttactaaaatcactggtggctttgaacctaaaagctagatttgcaaatctgcaatgttctgtggcagtgactggtctatgagctcatatggaccagtatgctccaagagacctggctgtttgatattcttcccctctcaccaccaccaacaacaaagatcctgaattttcaaaccatcttggttaaaatgccatttgtccctccatggttaagatcagtgggttggagagatgactcagtgattaagagcacttcctgctcttgatgagaacgtgtgtttggttcccagcacctacatgtggtggctcacagctgtgagactccaattcccagggatccagtgcctcttgtgatctctgcaggcaccagcacacattcatgcactcaggcacacatacatatgtacatataaaattaaaggtcaggacatacttgtattaacattctaaaatgggtttagaggtgggcagagttggaacgggtcagggaagtgttatccaaacccttcgctttacatgattatgacccagaaagtgcaaagaacttatgtatattgaaatggctccagaactttctaaaatataacccttcttggaaacatttgttctcccaaacatttccttggatatagtaacctctgtcaggccttagagtatgaagaagcatgtcctatgaggaaaaggaggagatgagggcttcgtttcgctggcatatctactccctgctgcctgctgttagtgttttaagcccacatccagctaaatttgctctgcccaactgtctaaccttcactccttcacctcgctagttccctagctgctgacacctgtgcctgaaggaagcctccagtcagacagaagcccctcagtcctccattcaggagacctactgcttattaccataactggacatttcttgaattaggctccaaaggtgacgtttaaatgagtttcctaagctgccactaatcaacaaccatgtgttaccgagttgaggtgttcagcctagcattgcttgatctccaagtccatagcgggtaatggccatcccctcaccccaccaagcactttggaaggaagcctggtggtgtaagatcaactgtggcttcagcactgtggagggaaatatgagggaagtactgcagtgggtgggaaaagagactcatgagactcttgcccaccagcatgaattcagccaccttggctagattctgctgctctctgtgtgacctgcaggcttcctgccatccttatgccccttccaggatcttcactatctgggctgaagtaactcatccccagccccaaggcagttattacaggaatgcaaacaacagctaaatacactctgggcatcaggagtcttgttcctgagagaatttgtctgattgtttgcatgtctttagcagatgtacttcctctctgaatccttaccatagcagaaatgttctgtcaagaggaaacacaaatgggagaatgagagagagggagaaagagagagggagagagagggagaaagagagagagagagagagagagagagagagagagagagagagagagagtgtgtgtgtgtaatcccataactataggttcatgcagagtccagaagaaggcagctgaagatggactcactggctgttgctgttgtaagctgcctgataactgaacacacatcctttgcaaaagtagtatgtgctctttaacctatgagccatctctccagcctgcattataattacataaagagtacttgagccaggctcgtgggtacctgcctactactaccgagggggcttcctagctactgaggaagctgaggcaggagggctgctgacactctcaagtttgaggccaacctgggcaatatgaggatcttgtcacttaaatacaaacaaaaacaagttaacaacaacaaaatacagggtgctttttttttttttttttttttttggtttttggtttttggttttttgagacaaggtttctctgtgtagtcctggcagtcctggaactcactttgtagaccaggctggcctcaaactcagaaatctgcctgcctctgcctcccaagtgctgggatcaaaggtgtgcgccaccactgcccagcctgagtgcttttcttaaaggaggcaaacatgattgttttctaaagggaaaaaggaaagaaaaggatcagctggttgatatataacaagagtgaaaggtagactgcactggaattggactagggaaagcctgaggtgcatgcacacacacacacacacacacacacacacacactgctcctgccattctctatggcctaacagccactgaagctgtgaaatacttgagaccagtaaccttttgggaaagggcagacttgctctgcatcctgtcttgaagtggcagtgctgagccagcttgccagtgttagaaagctctggaatggagaaaaacaaagtgagagaaaatgcccaggcttcactgagctctggagtgggggagacagaggaggagaccctgccactgagaggctgtgggttgaagacctgtgtgagtctccatggatgccccaggacctctcacacttgggaagcatcctggccactccacagtgccactcagtacagcatgaaaactgctattaaacactccatgtaagtccaggagcaaaatgttgaagaacaactgtcaaaggtctgaggtagttggctttcctcctgacatgaagagtcagaagggcaaaggagttctccttccacacacacatgctgtaatttccacattggaaagcttttcatgtctagcgggaagtcatctggttacaacccagacaacagtaaaggtatccagtggtgtcctctgttcctcggttgtcaccctatctctggttgctttatcagatagtcacaaaacgcttgggcaggggtttatccagctcaggccattagagtcctcaactgcacagccaagcctcattatctagattctatacttgttattctcctacttaaattcattggtaacttccaaatcaatgctgtgcttctgtgaatatttgtggacttgctcaggactctgaaaacctcaagtcaccagacatactggttcccagctgagatcaaacagtagccaacacatctgcatccttaaggaagggctttctcctgattccaggaggcctctgggctcttctggggctccacagcctctaaagtgaagtctataatggagatgtcttcccagcctggggtcacttagtcagtactactcaattctaaaatgaagaaacactaggctatatcaaaacaacaattgtccccacatcattgtgagcagatttagagacagctggactccaggagaacctagtctacatagagggacacccagccccagactacaagcttaaccacatagcttatttcccagtgaaattaccttcccaatgaaagtgggttagcaggaggtctctgcttccgatctgttatagaatgtctgctgccttctgtcagacagttgaaagggaagttgggtaccacactagccacaagaaggaagaactaggccacagtacacagtagtttgagacaggatttgaacaagcagacctggtgggaagcctggtctgctgctagcagcaagtcaggaaaacgatccaagtttcactttgcttttccataaaggagctaaatgtactctctgcttagcacgatactgtgtgatgtccctaaagtcctagctcagtggttctccaccttcctaatgctttgacccagttcctcatgttgtgatgacccccaaccacacaattattcccattgctactccataactgtaattttgctactgttatgaatcataatgatatctgatatttccgatggtttaggtgatcccaaaggggtctcaccccacaaactgagaaccattgtcttagatgcctacagtaaggcagtaatagccattaacaagaaagcccaggacacaggttttgaaacaaggggaaccagaactgtgcccaccactaaaccacgtgactgactactcctgggtctcagcttcctcatctgtaaaaagcaaatgaaaacgccagctttcactgagttctggaaggataaaacaggatactgcatccaacatgtgcacacgtgcacacatgcacacacgcgcgcgcgcacacacacacacacacacacacacacacacacacacacacacacacacgtagcacagtcagtaagtggtgctggtggtaactgaaatgctaatactaacttagatgcttgttctggctgcagagaatcacagtagcaccaaaccatcaacccaggacagcagagggtaggggaggctgcaactgttttggtgaaagtgaaggttctagaaataacagttaggattgcctcagctcctcctgagggtcatgacagggacagagctccagggaccacagtgaatacgttgacatgacttggcaggataatgtagaaaatgagaaaggcagggacagaaatgaccaagaaaccatgaaaagatgcatttgccttataaaaaagccacaaatgctttctgcacatttgtatcgttcttttttaaattactattttatccctcctcctcttcctcttcctcttcctcctcctcctcctcctcttcctcctccttctcctccttctcctccctctcccgactttgagataggctggcctggaacacacaggtttgcctgcttctgctttctgagtgctggggttaaaggtgtgagctatcaagtcttttttatttattattatttagtgtgcatctgtacatgaatcacatgtgagttcctcaatccgtgtgtgtcagaggacaactctgtggagttggttctctccgtccacgcctacatgggtcccagggtttgaactcaggtcaggatatagcaaatgcctgtacccactgagctgtctcaccggccctactcatgtcgttctaaacactgctaatctcttttgctcttataacatgtcttacttctgatttttaaatttatttcttgatttatgtatttacttatttagttatgtgtgggtgtgcacatgcatgtgcccttgcaatgcatccagacatcaatgtcaggacaacgaccaggactcagttctcttcctctaccacgtgggtcccaggaaccaaactcagatcatcagaattggcagcaggtgcctccccctgctgagccatctgtctggcccatttatttttctcttttgttttcttaagtatgttattttagttggggtttctactgctgtgaagagacaccacaaccacaacaactcttataaaggaaaacatttcattagggctggcttacagttttagaggcttagtccatcgttgtcgtggtgggaacatggtgacatggtgctggagaagttgagtcctacatttggatcttcggggagcagaaggagactctgcctggccgaccagacttgagcttaaagacctcagatcctgcctccacagcaatgcacttcctcgaggccacacctcctaacagcgccattccctatgggccaggcattgaaacatgtatcgtgagggcccttcctattcagcaccacagatatcaatcagcctgcattcatgctcattatgaggcaagcttgtcatgtcctttcctgatacaccagcttcactaactggttacgggcccttcttccattctctgagattgtataagatcaaaactaatgctccttaaatagctcctgttagtgcttttttctaaaggaaatatttcatctacagatgtaactgctttgataatcataggatagtatgacattattctttctttgtaaatcagtgcttattgttatttttctaggaatttgtggtaacttcctatgaaatttttgcttttgctaaaaagaaaaaatctatcttgttagatgtaggtacgtaaacattttgcgtgtttatataaaatatacttattctttcacttttaacattcctgtgctctgataccttaaaatcatctaaaactctaaaaagtattcaatcttggagatggagagatgatttaccatctgaccgccctagcagaggactggcgttcgattcccagcactggtatgggtgtggtggatctcaactgtccgtagctcgagtcccgagggatcagtgccatcttccagcctcaggcaggcacattagtgaatacagtgatacactgcagccagaacatcgaaacacattaaaataaatagattttttaaaatgttaattcaatctctagccagctttggcgagtaagaatcttaaatcttaggactcagaggaggagggaggcaggggaatcaggaagatctggaggtcaagccttgtccacaaagtgagttcaagtccagcctgcagtatgagagcagtttcccaaaaagaagaaaaatgcactccaatttttctttattatttacgtaattttaaacatttatttgtttattgtgtatacatgtgtgagggcaataagggatggacagggtaatatgcttaacatacaatatatgccagtaaaaaataattgaggacaatcttctttttattattgagaattttatacatgtatataatgggtttttgttttgttttaagatagggtctcattatgtagcattgactggatggaactcattatatagaccaggatgacctcaaaatcacagagatcttcctctgcctcacaagtgctgggatcaaagacatgtaccaccacctccagccattaagatgttttgatcaaattcacaccccagctgggcgtggtggcgtatgcctttaatcccagcacttgggaggcagaggcaggcagatttctgagttcgaggccagcctggtctacagagtgagttccaggacagccaggactacacagagaaaccttgtctccaaaaaaaaaaaaaaaaaaaattcacacctcgtccctgctgctactttcccttcccctcccacgccctattcatgtttgttttgtgtgagtttgtctgcatgaatgcgcaccacatgcacacagtgccccgagagacttgaggagtgtgcgccacagctgttgccaccatgtgagtgctgagaactgaacccagatccgctgcaagaacatggtgcttaaccttctctccagacgtccttttcttttctaaagcccgctggttgtacttagtgccatctgtgtgtgcatggatctaggaccatctactggagtatgggcagcttttgggggccacatcccagaagaaaacttattcttcttcccccagcagccattattaattattattaattcttctcagtcaggaaagcatcatgaactcctccctgtgagctcccaagccagatgagaagtggtagagcattgcactacccagacaactctcagaaagcacagcgggagtggaactgatccctactcaaatcaggcttgggcctactctgttccatagagacaaagaccacgtcaggatacagctacttaggctgctgtttccctcatcagaaaactggctcctcagaaatcacatgatcagcagttgctaatctggctgaagcactttttcctttgtcctttttccttccctcccaccatgactcaagccagccccaaacaagctgttctctgaaacaatactcacagccctccgcatgttctccagctccccccacccccaaccctgagactgctgtgggcaatggccaattagggccaggggacccacttctcctcaatccatgcagaaatttttggcttgtttgatcatttgcaggtatgcaatcatattcactgtttgtatttgtaaacatacagtcatatctgccaaatactgtttgtctacagacacccacctctgctggctgttagagtctttttacttcctcttctgcaaggtctctgagtcttgagacgaggggctatgatacagatgttccatttagagctaagcacaccacggtcttactctctgaacactgactagctgtagatctctatattggctgttgtctaccgcacaaggaagcgtctctgataaggttgagagataaactagtctatgggtataaagacaaggacatagaggacaatgtaatactacatttagcaaaataatagtattagggtctccactaggtactatggcctaaccagtcgtgggatttggctcagttaacaataccagatatgagttccatcatgtggactggattttaaatcaaaccagaaagtggttggttactcccataacatttgtgccactatcacatgagtgggaacattttgccaagatagtcattgtagttcatggagttcatggctagataaaagtgcttaatacctttctccccgagtagaataagtagaatatggcactataaaaatctatccagtagaaatgaagctttttggttactaccagcttgagtcttcacattctgtgactgaagtgtgtggtgtgttcagggactaagtcttactatcaagctctagcaagagcgagagcaagagccctagcctgtaatgtttagaggaatccatggtccacaataaccagcaatataaaaagagataacccatacctagcattggtccttttatttgatagcctacagtgcctggggaggcatgctcctctattatagggttaatttaatttaaactctcttttatatgtatatattttaggaagttttatacaatagtaggtttctatgaggcatttccagtggtctttagtgttagtcatccttcctcatacgcccctttattctaccctctcatatcccagcccatttaagaaaacacactttttagttaagaatcattttcggctactacagaatcctggttatagaaatgattcaaattttagtggaacgaagggtctcctgataaaatgatttagagtactggacctgggaaacagctcagtaggaaaagtggtataaatcatgcgagcccaagttctgccccctggacccaagtttttaaaaagccaggcgtgacagaatgtattcctgtgatccctacgctagatacacagagacaggtgcattcacgaggttcactggccaaccatcctaggctaatcagtggactccaggttcagtgagaggaccctgttaccagtggtcagcgtctgagctgggtgtttccagggtcttgacctcctacccaaagaattgaaaataagggcacacatagattcacaaaagaagcaagataattaaattgtaagggaagcagtaaagcagattatagggaggtataatgtcaagatggacggcaggccatgtgagtgctcatggacctaactcatgtttggaattttcttttatgatatgggagagaaggaggaattgattactaagggtatagtttgggcaatttattttgattgatagactaggccatacatttattttccctactgtgcctgttccttcccacaatgcgtctgattttggtctctctctctcacatacacacttatatacaaacacacacatacacactcaaataatacattcacattcacacacacacacaccgagagagagagagagagagagagagagagaataatatacacagagaggataataaataaataaataaatgcagaagccagcccatacctcaacttggggatatttgaatcctgagattaggccacaaaaacttggatttttatttgtttgtttgttaaattttggtttgcttttgcttgtttgttttgcttttgttacagtcttcctctataattaatggtggcttaggactctccacgatggccaggctggcctataactcaaagaaatcctcctgcctcaacttctcaagtgctgggattgtaggtctgtaccatcacacccactggaaagctgcatttcacatggctgtagcatttaatgtggatgccagaagttctgactacgctttaagtttcacggagtagatgttggcagaggatgtcagtgaactggtggggactggacagcctagcatgcagcctgccagtctcaccttcccggtgtcttcagttctctctgtaaacgtaatgacagtgtggggaagccacgcactcttaggatagtaccccagcacacacaagctgggatgcaactcagtagggaaagagctggcttagtatgtgtgaggtcctgggtttgatcccaagcaccacccaaccagatgcactagtccatgcctgtgctctcaggactagggaggtggagacaggaggatgaaaagttcaaggtcatcttgagctacatagtaagtttgaggccagcccaggctacctgagaccccctgtctcacaatcaaagtgaaacataaaacacaaacaacagaaagcgctccaacccacatttacctgctgctcccaactcacacatttcctacccagggatgctaatcgtaaagcattaggtgtttgcattcgccctggagtcaactgtaatagggatgcttgccctctgcatcctcatagatctgagcccctaaggtctgcagggggtggggcaggaacatcgggagaaggaggcttcattaccctcagacaaaggcttgcagcagattcctcctatgcattcagcagcctgtataggattagtgtatacagcatgtttagaaggccccatgctatatcccattgaccgccagtgtcaaaggcatgaatgccttttgctgaggcaaggggagctctctgaaactatattttctctttttaaagcaagagtcccagcaaggctgttggaggtgccctaaaggtccacaaggcattgttatctgtcccctgagccatctctggctggctcgctccccctccctgactcctttccgacttgcctgtgttgcccctagaccatgggctcaggggcctctggacaaagctgctgactctgaccacagcctttctctggaccgtgttcatttgcatcaagctgctgagggtggaggagctatataggctctgggccattcaccagaggattaggcctgggctgagggtgcagctggagaggccgcagggaaggccgggttccgctgttggtcatcatgccctacctgctgccgggattcttctgtgacagggtgatccgagaaagggacaggagaaatggagagggcactgtctcacaacctctcaagtttgaggggcaggattttgtcgttctcaaacaacagtgtctggctcagaagtgcctctttgaagaccgtgtcttcccagcaggtgtgcaggcccttggctcccatgagctgagccagaaagccaagatgaaggccatcacttggaagaggccaaaggtagggataaagggggcatggaatctgtagacagatgttggggaactgggagtaaagtggtcagagcgtggggctgtggattcaccccaactctgagcaactagcttattaatgtcccccttacccataagccccagctccaaatacctaacttcttatgctagaagctaaggatgttgttttctattcctgaactgcgtggcgagggttaggatggcctttagatccctgagattatatttaagagtgccaatgcattgatttaaattcccataagattcgtaggtagaatcagctcggttcttcccgagaccaggagtttggggagggaagagtggagtggtgaagagaacagaggcttgaagtttcaggtccacagaagggatggacagtgaatcgacaggaggctggaggcgagccttagccttctggacgaagctggttcattagcgtggtgtcaagtctgcttaaacagaaaagtccatgctgaccagccagatagttgatccaggctgccctatcaaggggcatcctaggagccccagcatggcagcaggaggacgtcaaagcccttcttcctgaaaggcggtgcctatagctgcaagggagcctgctatatttagagctggcaaggagtgtgcgtgtgcgtgtgcgtgtgcgtgtgtgtgtgtgtgtgtgtgtgtgtgtgtgtgtgtgaaaacccagaacatctgcaaggcacattctttactgtatatgcaatttttaattagttaaattactttttaaatttttaattaaattttaaattaattttacaattacaggattacataaaaactgtaaagatagcgctgggctcccatgtgtagtccctcttacctgtgcttttcactctctgcagtttttgctgacctgtagtcaactggggtgcgaaaatactaaatgggaaattcttgaaatacttcagaagttttaaataacctccactattgtacattgttttaattattctattttattgtagtattagtcatctctcattgatttatgagttaaactattggtgtgtgtataggaaggagtctaatgatctatatgggcattggtcataaccacagtttcagattcctgggggtcttgggatataccccacaagtaaggagaccgctacctttagtccagttttccttgttatatcatgacctgtacctcggcgatcagtaagattgatttgttattgaaaacaaagtccacacgttatttccttagggttcttcctctgtctttttatgttccaagactcctcccttgtattcacttatgtgtcttgtgtccttagcctcccctctcaagttttcctggtttccaatgagctgtgcactttcacagagcactaatcaggtattttgtaaaacacctctcatggcatctctctcgaattttcttccgagtaggctgaacttatggatttgtttgggtttttttatatataattttttatttattttaaagtagctgagtatttaagtatgtgtataccacatgcagtgctcatggtggccactggatggcactggagcccttataactgaccattacagaccaactgagctacagaccattggaaggcaggtgctcaacaaaggctgagccatctctccagccctgggcttatgtgctttgaggaggctgatcgcagaggtcaggcacagactgtaaaatgcctcctcactgctcacattgactactttgatatgttgcactgctttgggtgcagaaagtcttataattctgcatgagaggtctgtgtactctgtgtgtctctgtgtagccctttataccaatactgacttatgcctattcattgccaggagagctatggtatgatatggatgtgcctttctatgtagtaggatggagacaaccttgagtgtgagggcagagctcagctcacttgggagaattgtgtagttgtgaggaaggagaaagacagtgagacagaaagacagaggacatgtctaattagggtttctattgctgtgatgaaacaccatgaccaagacaacttgggcagcaaagtgtttatttcaggtcacacttccaggtaaggaacggcccatcactgagggaactcagggcagaaactcaaacagagcaggaacctggaggcaggagatgatgcagaggccatggaggggtgctgcttactggcttgctcttcatggcttgctcagccagctttcttatagaacccagtatcatcagcccagcgatggccccacccacgatggtctgggccctcccccctcaatcactaatttagaaaatgccctacaatcacatcttatggaggcatttttctcagttgaggctccctcctttcagataactttactgtgtcaagctgacataaaactagctagcacagaacacttcacaggaataacaaggtttcttgaagctgtgaagaacaacattaaaaatcaaaacactgaatctttaatgagtttaaaagttttttaaaaaattgccgggtgtggtggtgcacgcctcctttaatcccagcactcgggaggcagaggcaggcggatttctgagttcaaggccagcctggtctacagagtgagttccaggacagccagggctacacagagaaaccctgtctcgaaaaacaaacaaacaaaacaaaaacaaaaaaatttaaaacgaagcagacactgaatgaaatcaagagtgctgtctgttggctgctgatgggcgtgacttagcccatgggcttggaaactgcagctgccaccattgctgctgtgggtgtgtttgccccttccaactggggaggggggaagaggtgaggctctcgtggggtttacagtctgcttccgcaactgccaaggcctgtgtccggatttctaaaaagggaagattgttctcctcctcctcctcctcctcctgctcctcctcctcctcctgctcctcctcctcctcctcctcctcttccatcctgtgccccagtttacagaaaacaaagccataagttctgcagcctcttgcccgtcccccctctcaaagaacattctacccagtacgtggtatggaaagaagaggggacagctttgaggctcttacctcctctgaccctcagatgtttattgttcattttgagacagagtctcccaatgaagcccgggctgaccttgaactagccatgctcctgcctcagctcctccagtgctgggattacagctgtgcaccaatacaccaacttctgagcttcagctttctggtttcaaaagaagagcgctggctctcctcttggatggctgtggaggccggggagggggacagtgagtgtaaatctttggcccccagtgcagtaggccatcagctcagccaggactcctacaatggtgttacaatggttgtttctgttttgatttcacaggaaatttgtgagaatccccggtttatcattggtggagccaacaggactgacatctgccaaggagatctaggtaggaaaaatcctctatgtcctaccaggtgacccagggttagttaacctgagagatctctattcaggatgggaagggataaattctggtttctcttttagtgcatctcctaatattttaaaataatttttatttatttatttagcgagtgagtgtgtctgtctgtctgtctgtctgtgtgcatctgtgtgcacataccatggcctatacctgtgaaggtcaaaggacaccttgtgggggccaggtttttccttcttccgtgtggcatctggaggtcagtctcaggtcctcagatcaggcatctccacactaaaggaagtcttttggcagaggcggcgtctgccatgtagaggagaggacaaggttctgtcaccttgtcgtctggactgttctgagtcccttcctctcctccaccttttgttctggaagcatcctccctaggcagactgtaggagagctctgtgaagagaaactggagagaacattaaaggactatttaaaacttgacccaaaaaaagcaggaacaactgaaaaatacctatcactttgttccagaaagggaggctgagaacacctcaggtacagtggcttctggcatctgagggacactgcctggagggtgtggacaaattaatccctgagccctcaaaccaatacactgcttctgagctgagtcaaggcagggagatagggggtttgggtggttacgagcctctcttcccaccagcagtgtggcagctagcctgtgcccccagtagagctatggaattgtcagggtaccaggcatgtccctttggcagccttagtgacctgtgtagaatggttctgtggcagctagctgcccaacacccctgccttctgacacacgtctgcttagctgatggttctctaatactgttttccgtgatgccagaaggggaaatgggctcaccctacaaagacagaggacagccataattaccactgttgtctctactgagaccatagaaggaagtgacttatttatttatttatttacaatgtaaaaagcaagaggaatttattgttccaacatgttgcggttgccctgcacatggagagagagaatgaccaggaagtgttttattaaaggaggaatccattgcctaacttaggaaagcctgtcttgagagaatgagttacccggtcctcgtgctgctcgtgccgttgaggagctcctgtccctgacagtctccttgcttgagctcacacctacttgagggcaggcaggaagcagggcagtgggcatcccgagtcattagctatggggagcttcttactggggctggcagggctcttctgagaggggaagcccccatctgactacctgggtctgtttttgcttgcaggggactgctggtttcttgcagccatcgcctgcctgaccctgaatgagcggctgcttttccgagttataccccatgatcaaagtttcactgaaaactacgcagggatcttccacttccaggtgaggaaatgggggtgtggttgagacagcagccatacctcagttaaagataacctcagagaaggcaccaaaatgttccgtgctgtagtaaggaggtgaccttctcttgtctgtagtctgtctggtgtctgtgtctctctgtgtgtgtgtgtgtgtgtgtgtgtgtgtgtgtgtgtgtgtgtgtgtgtgtgtgtgtgacccatctgcccttgttgcctgtgtatctaatgaatgtatgtgtttgctgtcatgtnnnnnnnnnnnnnnnnnnnngtcatgtctgtgttttttctcatctgtgcctgtgtcatatgtctgttgcctagttgtatgtgtgtgtgtgtgtctgtctgtctgtctgtctgtctgaatctgtgcctaacagagggctttggtttgtattcattgaacagtacagaaattctttgcagaaatcttgaacagatttttacaaggaaagaaatcactttattgacctcaaatcacccagagaatcaaaagcacaaacccacagacatattatcaacttacatccacgtgtggcttccaaaatggggtagttgttgcgtaccgttgcttccaacctcttggctgttttcaggaaattattaccacagcgtgcataatcttaggtcatggtaatagtaaagtacataacttgagattaaagctgtgtgtttagcttaggttataaaggctgattacttgggaaatcgaaagcataatgaggttggctgctctgttctctgaaaggcccattaaacttccccaggctgagtgcagagaggccagcaggctaagtacatagccctaaatgatctcaaggcatattattaacttggctgcaaggtcccggaaacgttcagtctcttctgagtcaagagatattttcagacaagtatagcaccacccagccacagtctggccaccctgggtctcccggccttgacttcccagctggctcaggaaaggttctacacacctacctgtgggcaatgacccacttacagctacaagcttgcaaagaagcaggtgtttatctgtgccctccaacttacatactttccactgtgccccagaaagggggagagaaagtcatccaggctgctggcttgagtgcctattcttgtcctccagctggctggctgctatgttattgcctgaagccccctcaaacaggttcttaagatgctcagcctgaaagtgttggattttttttttctgtgatccctggctcatgaccctgtacccttgacagaggagtctatttaccttcctactgctatcacttacctttctaggtcttaccagaaaattctggtcttctgggcatttagtggctggtttgacccagccctgaaagtattggttctagaattaatttatccattagaatttttctgggcactgatcatcttgatgcagagacaaattctgggttggatcagaacagatctgagacctgcatgtggggctctggaactttctgtggttctgagcagcgtgcctctggccctgaaacttcctagtgtcgagaatgactcaaactgatcagctgacatcccactcctatggtacctcagcatatccagtgcactccccttttccattttagccatcaatcaataaataaatcagttgggtgtggtggcacagacctataatgccagcactcaggaggcagagacaggaagatcaagataagttcgaggctagcctgggtacctagtaaaaacaagttgtttatctgtgccccctgacttctcatccttgacgatgtgccatgggaagggagggaggaaggcatactgcctgctgacctgtgtgcctcaaacacaatagaaagaaagggaggaggggaggggaggaaagaagaaaatgggataaagagaaatactttagttagccctacagctttccttaatcatgagttctcaatcctgggcgggcactggaatcacttgggatacacgaatgtatttaaactaggtctgtcccagacctatgggcaagggagaaaagtctcaaaccctaagatattcagaggacctactatgtctagaactgggcttttggcagacactaagggatatgcagtttcctgttttgcagaagttcatggcctagttagagatagatttacacactcaaaagccagactagaatgaacaagcttcaggatgcaaagtccaggaaatggtagggttttggctcagagtcctataggatgtgggatcaggtaagggagtgcacaggggtgattgggcttccttcttcttgcagttctggcgctatggagactgggtagatgtggtcattgacgactgtctgccaacatacaacaatcagctggttttcaccaaatccaaccaccgcaatgagttctggagtgctctccttgagaaggcttatgccaagtaaggcaacatttaggatgggaaacatttaggactacaggggtgggggatatggatttcaagattcagccaaagtctccttcacatggggctaggcatgtgaatgcatgctcatgtggattgtgggagtccagtaaagagcccgagtcagcttgagatcaggactgggcagtaggagccctatctgaaaaacataaaagcaaaaagatataaagatgtgtgcagtaagtcttcagcttcctacagtcagctctttgatcctgccttcatcatggtgtttcaagtcttcttcatcagctcattgcttctctgaagttcagctcctaggatcttacttgcttaaaaccatatacttgtagcacattcataagaccaggttgtctcttaccttagccctccacctccgccactagatttagcagatagtggaagagggctgtgggaaatggggaccgtcatgacaatgcttctggccctctctggcctagagttaactcagcttgtcatacttcctggaactcctagactccagactgccttttgtcctctctccaaggctccatggctcctatgaagctctgaaaggtgggaataccacagaagccatggaggacttcacaggaggggtgacagagttttttgagatcaaggatgctccgagtgacatgtacaagattatgaggaaagctatcgagagaggctccctcatgggctgctccattgacgtaagtgtgattccagggaggcccttcactcagctaacaacaacacacagcttcctcctgagatggggtggatgctgtaaaagcaagagccacattggtgagatggctcgctggtaatgacacttgttactaaacctgaggacctaagtttgatctggaatccacatggtagaaagacaatggactcccgaaacctgttgtctgacttctgcatgcacttcctccccacactaaataaacaaatttttttaaaagaaactaccagtaattccagcaattgaaaagttgaatccaacctgatttgattagtgaggtcctgcttctaaaaacaaagaacatggatgatggttaactttaaaattgacagtttttcggtgggaatgtgtccctgaaggtggggtgctttccaagaaaaagaatgagccatgacactccaaaccctagaattctggtagcaatagaccagaggccccactgattggcctctcttgtccagactgctcagcacaagcgtgccccacaagccaaccacatcgctggctatggatctttgcccttagaaagttctgtagtcgctgagttttgacatcacctcagtccttggactctgtgctgcagtctggatgatctctctgaccctctctcagggtaccaagatcatatgaactgagacaggaacaaggagaggacccaccatggcctggtttccccaagagctgctttgggaatagtagtctggggtggggcaagccacctcctgcctctttctctcccagcactccctgtgggtaggaaggcttggttgtcaccacatgggagaactctcctgtcctgtcattgtcttgtatcttttctgcatttacgctctgttgatgtctttctcctcttttgctttgcctgtcgctcccccttcccttcccgccctcccttgtttgcactctttctttcctgggttctctactttccttcccattgggcctcaggatggcacgaacatgacttatggaacctctccttctggtctgaacatgggggagttgattgcacggatggtgagaaatatggataactcgctgctcagagactcagacctggaccccaggggctcagatgacagaccgtcacgggtgtgtacatctccaaatgtcgagactgactagcgcccccagatctgcatggcccatccttctgaagtcagtgccaacagaatagattccctccattttggtaactctcctctaaggaacacagggcttcagtgctatgtagtgcttgcatcctcctgtttgaacggcccatgtgcttcctgaaggactgagccagacagaaaagcacagaggaaaagttagtctatattttctcatctaaagataactgcccagggtttggtatatggtccttctgggcacaagcttaaactatatattttttaaaattgtatcttagtatatgttacatctttacagcctgttttttgttgttgttgagttttttggtcctcccccccccccaccagcaagacagggtttttctgtgtagccctggctgtcctggaacttactctgtagaccaggctgtcctcgaactcagaaattcgcctgcctctgcctcccaagtgctgggattaaaggtgtgtgccaccactgcccggcaaggttcatatttttaaaatgcaactaagtattctttttatatcattttagtagctgtacaatattctagtgtacaaatatattataatttacttactaacactctattattgaagagttagagggtttttttaaagtctgtttttcaaaagtgctgtaataagcataaagacagttttgtatacacccataatggtttctataggagagtctcaagaagaaaactgctggtcaaaatgataggccgtgtagcgcgccaaaagccatctcaggcagcctctgagctatagctgagcggattagtgagtgccctgccctaatctgagtcagatgaatgaaatcgaagacactaagatgaaaaaagttccagactcacctacacctgtcaccctgaaggcggcttcaggaattcacctccatgtggctcccagaagcttccccaaagctgttgttactgggccagcggatgctgagatgcctgtcgagagctcagagggcgttggtggtctatctacccttgtgccgaggaaccctcaagaactagaacttgaacatctttgcccctgaattcaggcatagtcctgtcacagcagggaaccgccccgtatgtattgccagcattgggagtcttgacttccatgttctagtaagtgtgagagaggtgaagtgacagcaagagaactctctttctcaaatccttctttggggaatagtcaactctagatgggctcagaggaaggcacagaccccagatgtccccctctcctctgctgagggagtctagaatggaggagaaattcttttacttacctcctattccaggactcaccttgatctctggccatcagggcagcaagatcagctaggaggactagggcagcatcttcctgttgctcttgaaaaaccagcgagggtctgaccctggccataaggcataaggtcaaggaagagagtcatctttagtctgagataactcagaaaaggaccagcatgaacccttgtctccaatcagcagaacttctgccctccttcaccccaactcctgacaagctgtctggttatttctctacagacaattgttccagtgcagtatgaaacaagaatggcctgtgggttggtgaaagggcatgcctattcagtcactgggctggaggaggtgagtctgttggagcttggtggggcctggaaacccctgagctgacctgctaatgtcaggacttaactttctgtgcctctctcatgacccagagaacttgccagtcaggtccaagctgggttcctgagggcagaagggacctatgggactgacttgaggtagacctggccgctaatcttctgggttcagctgtgtgtctagtgaatgtacacacttatgtatttgtgcctgtggaggcaaggggtcagtattgggtgttccttggtgattcatcttattttgagacggtgcctctcactgagcctggaccttaccaattggttaggttggttggtcaatgagctccagggatccgccctccctgtgctggggttacagatatactttgctgtggcatcttttttacatgggtgttggggatccaaacttgggtctctattcttgaccagcaggtatttcatcagctgagtggttccctggcccttccctttgcttttaatgctgaagactgggatttttctagttgtttccaaggaacaactagaaacacagcttttggcctacaaagttgagcttgtgtactgccttgtttcctgttcactcgtgtccattttgcttcctgtggggtttctgaagtgtcctgggtcatttcccaagcaggatcattgtgaggctgtagcatgcagttggacaggttatgtcctgaaaaaaaaagtggcctaagaggctgagtctgcatcccccagggcacatgactggagaatggggcatctttttctaactgatctgttaaggggaggcatctgtctgtagtttatctatgaggggcctgctttaaatcacccacagaaaggtgtagtgaagggtctcagtagaagcacttactgcgcaagtctgaagactcaagtccaaacctgggacccagagcagaaggagaggactgactccaggaagttgtcctctattgtgcacatgtgcactgagacacatgcacacccaccctcacatcacacacatacacacatgtgcacacacacatgcacacacacacacacactgaataaaaataagggcaggagaggtggctctgcagttaaaagcatttattgttcttccagaggacctgggtttgggtcccagcaccatcaggtaactctagttccaggagctctgagaacctctggctgcctgctcgggcacttgcaggcatatggtgcacataaactcacatgggcagacatacatccacataagtaaaaagaataaagcctaacaaaatacttaatatgtttctaaagcctcatcataaatgtttatccccttccaccagtacataccatggccagatgcctcaccctgtcagcaagcttctggtttgtccacctggccagggccaggcaggcagcctttatactggattctcacaacttctacccagccctcataccaaatcagatgccccatctttccaaacttgcttgagcttccaagttgtgtctctttgcctcaggccctgttcaaaggtgagaaggtgaagttggtgcggctgcggaacccctggggccaggtggagtggaacggctcttggagtgatgggtgaggcagtccacggtcaacagagcttggggccacactggggtgggtaccaaaccatgagagtactgttgatactggtggaagatcactctcaaaccagtgacctacagagaaggacactggtgtgggttccccaaaagggcaggaggtgaaggcaggggagccagggactcagtgaacatgatggtgcttatattcttgaggaaaggttctagaagcctccatcagagttctggactaaacaggcaattcccttcttagtgtctatcccctttacctcacctacaaaatggaagcagtacctacagtgtccagatgactcttatgaggggtaaaggtgacagctggggaaagctcttaactgagaccaaaagagcctctcttttggagagaaagaaagaaagaaagaaagaaagagagagagaaagaaagaaagaaagaaagaaagaaagaaagaaagaaagaaagaaggaaagagggagggaaagaaagagagaaagagagaaagaaagaaagagagaaagaaagaaagaaagaaagaaagaaagaaagaaagaaagaaagaaagaaagaaagaaggaaagagggagggaaagaaagagagaaagagagaaagaaagaaagagagaaagaaagaaagaaagaaagaaagaaagaaagaaagaaagaaggaaagagggagggaaagagagaaagagagaaagaaagaaagagagaaagaaagaaagaaagaaagaaaggaaggaaggaaggaaggaaggaaggaaggaaggaaggaagaaagaaagaaagaaagaaagaaagaaagaaagaaannnnnnnnnnnnnnnnnnnnnnnnnnnnnnnnnnnnnnnnnnnnnnnnnnnnnnnnnnnnnnnnnnnnnnnnnnnnnnnnnnnnnnnnnnnnnnnnnnnnnnnnnnnnnnnnnnnnnnnnnnnnnnnnnnnnnnnnnnnnnnnnnnnnnnnnnnnnnnnnnnnnnnnnnnnnnnnnnnnnnnnnnnnnnnnnnnnnnnnnnnnnnnnnnnnnnnnnnnnnnnnnnnnnnnnnnnnnnnnnnnnnnnnnnnnnnnnnnnnnnnnnnnnnnnnnnnnnnnnnnnnnnnnnnnnnnnnnnnnnnnnnnnnnnnnnnnnnnnnnnnnnnnnnnnnnnnnnnnnnnnnnnnnnnnnnnnnnnnnnnnnnnnnnnnnnnnnnnnnnnnnnnnnnnnnnnnnnnnnnnnnnnnnnnnnnnnnnnnnnnnnnnnnnnnnnnnnnnnnnnnnnnnnnnnnnnnnnnnnnnnnnnnnnnnnnnnnnnnnnnnnnnnnnnnnnnnnnnnnnnnnnnnnnnnnnnnnnnnnnnnnnnnnnnnnnnnnnnnnnnnnnnnnnnnnnnnnnnnnnnnnnnnnnnnnnnnnnnnnnnnnnnnnnnnnnnnnnnnnnnnnnnnnnnnnnnnnnnnnnnnnnnnnnnnnnnnnnnnnnnnnnnnnnnnnnnnnnnnnnnnnnnnnnnnnnnnnnnnnnnnnnnnnnnnnnnnnnnnnnnnnnnnnnnnnnnnnnnnnnnnnnnnnnnnnnnnnnnnnnnnnnnnnnnnnnnnnnnnnnnnnnnnnnnnnnnnnnnntccccatgctgaaaatgtgcctggcaataatgaaacatacagtgagtaacattttggagaaactgatttccggcacactcttttcaaagacaaatgaggagtcatgaacataagacatggtgatagtttggggtagataggtcagaaatgacagtgccaggcacacacctgtaagtccatcatttgggagacagaggaaggagggtcaaaaggtcaaggccaaccaagaccacaggatgaaatcctgtctctcaaaagcaattgaacaagccaagtgacatcagggtcttctggggggctttgctgtgctgtattagcccttgaatcttcccttcctcagcctgtgtgagtgtctcctctctcaacctctcaggatgtcatatgatgacttcgtctaccatttcacgaagctggagatctgcaacctcacagctgacgccctggagtccgataagcttcagacctggacggtgtctgtaaacgagggccgctgggtgaggggctgttctgctggaggctgccgaaacttcccaggtgggagagcctctggatgggggaaggtctaggcagaactcattccaggcagaataatattagctatcacttatggagcctgtcctaaattcaggatgcactgtcttattaaagcctcctcagttaaggaaggaaacatgccaagggacctccgacagggagcttgtagcaacttgagcttgaagcaggaaactgtcagagcgccatgccaatcctgctggaggtgcatttgaggacctggtggccatggcacttgcccatagcagagatgctgaatgcatggccaaggcagtggcctcagagatggggcagcagagagaatgcagatttagggaaggaataatgaacgataccaagggtcctgctgtttttatgtggctggttgtggagttacagtaagaggagtttagtttgtgacatgaaaagtttgaggtacatattgactaccatggtaaagatttgtagtagagaactgaagtcatctacattttagagtagacttggttatatgataaaaattcaatgaagatgacagaaagatggttcggcctataaagaactttccgggtaaactgagtctggatcctcaaacccccacaaaagtcaggtgcactaagttgtgtgtccaagaccccagggatgggaaatggagacaggagaatcccagaagctcaggggccagttagcccagcatacacatcagcagacaacagaggctcccaagcaaggtgggaaggaggaggactgatggtcaacattgccctttgacctccatgcacatgccatgccatgccgtgcatacatctgctttcacacacacacacacacacacacacacacacacacacacacacacaccatatacacacaaaactcagtattttatgatgaaaaaaaaaaccaaacgaggaaatagatgagaagaaaagggtggtagagagtgggaagccagataggaaactgagcctagacatgtacctcaggtgtcattggaatgtagggctcagttagaaagtagaggtcacacaaagctatggtggtgcactcctttaatcccagcacatggaaggcagagacaggcagatctctgtttgaagccagcctgatcttcagagagagtttaggacagccagggctacacagagaaactctgtctctggaaaaaagaaaagagacactaacacnnnnnnnnnnnnnnnnnnnncacacacacacacacacacacacacacacacacacacatcacatcacagtggagagggtcagatgcctagggaaacagcataggtgaaaccagaggagaaacaaagcctcattcacttgagaccagtgacacttgaggagtaggctaaaaagttaaacagctgtcatgtgtcaaagacaatgaacgttcagaaaggacatgacagcattgcacatccagaccgtgcaatgccagaagcgctggtttagctttctacagctgtggtgaaataccaagaccaaaacaacttggggagaaaagggtttatttggcatcactgttcatcagaggaggaattcaggaactcaaacaggcaggaacctggaagcagatgctgatgcagagaccatggaggggtgctgtttaccagcttgcttgatttttttatagaacacaggaccacaggttgtctgcttacagcccaatcttagggagacattttatcagtggctgagaggaggagattccctcttttctgatgactctaacttgtatcaagttgatataaaattagccatcataagggtagggggtctcactcaccaataattacacaaacgcttggatcatgctttccataaataactgtgcatcttacagttgtccggaatgggaagcaggcctcttaaactttttttacatatatcttcttttcaatgaggaatttttacacaaccccgtgtataggtgtataaaataggtatgcaaatcagacacttactgataaatcattaagacatttacttgggagtctgggggtgtaacacagttgatagtttgcttgtctagcatgcatgaagtcacaccctcacacacatacacacagagaataaagcatgtatggtggcacatgcttctaatcccagcacgaaggacgtagtcaggagaattgtcacaaaaaatgaaaagaaaataaatttattttattttaaaacagttcatggtgcacatgtaagtttgccatttattttatgttaatgagataggtgcacttgttcgcttttgctcaaaaaaattaaatcttgtggaatattagataccgtaggacacagagcatcttctttttggaattgatagatattttgatgtcataattgtcaatcttgagaatcccatttatataaataagtagtacgaatcggcagcagttcttagggccatttcagaaatttctgggaattctgtcctaattctaagtcaaaatccatttaatgggaactggcgagatgactcaatggtaaagagctcttactgctcttgcagaagacctcggttcggttcccagcaatcacatggtggccctcttctgatctccatgggcaccagacatgcatgcggtacacagacataggcaaaccatccatacacataattcaaaaccttaacgttacccatcatagggaacaaaggagaccggatctctgtcctactttccttcctgccctttctcatagaggcgtatctgaacacgcatttcctttcttgggtcacagacactttctggaccaacccgcagtaccgtctcaagcttctggaggaagacgatgaccctgaggactctgaggtaatctgcagcttcctcgtggctctgatgcagaagaaccggcgcaaggaccggaagctgggggccaacctcttcactattggcttcgccatctacgaggtatgagcgccccggctccagtacgggaaacacctttccagcggggagaacttgggagtttccaacagggtcttctggtttttcatgtccccagtgaccaacagggctcctgctctcaggctcacacatgtctgtcaccagtgtaaataccacagttgcagaaggcaggacggagctggccgggtggtagcaggagttagagcctacagtcactctcatgtgtctggcattcccttctgcagactctgtaccctcatttacatcagagatgttctttttctatttcgcttccaggttcccaaagaggtatagcagtggcagcgggcagccgtggtgtgcagcattccttgggggtcctaagtctgtctgtggccccctaagaagattcctggtagggttggtgagcgaggctgataggagggtaccacgcccagaatgcacgttttctccctcccaccaggacaccctgcccatcaaacacacaaaccttcccacacttattctttcatattcatgcaagtatacactctcagaggtgcgtttgaaggaggctgcctcctagaataggagaatcgccttcttcagagcccagagtccttccccatctttggggcacttgtgagcttgagggatttggaattggggatcatcagttctggtgagtggccctgccaagggaaaaacatagacctgacctttatttctgaatcctgcccccccaccccctccccccaaaaaggaagaggaggaagtgagctacagaatttctgtgatgttcagcaatttgaggccttaggaactggaagtaggtaggtaaggactgtgaaacgaatgaccaaagagtcagggcccttggaggggactatgagcaggtccacacaaccttcccaaggggctcagttcttttgggttcttgtccccagatgcacgggaataagcaacacctgcagaaggacttcttcttgtacaacgcctccaaggccagaagcaaaacctacatcaacatgcgggaggtgtcccagcgcttccgcctgccacccagcgagtatgtcatcgtaccctccacctacgagccccaccaggagggggaattcatcctccgagtcttctccgaaaagaggaatctctctgagtgagtggcagcctggctttccccacctaccgctaagaggtcactcatgtggcccatcctatagccaggaggcagctggaccaatttccttcaggtcttttgggacacagccacaggcttttgccattctgtactctaggacctttactcaagttccttcagtcctttctttgattgctttttacagcactggagtgcaatcccggggcgccacaggtttaactaaacctcccaggctggccttgaactcactcagattggcctcgaacctttgatcctcctaccccagcctccagaggagttgcaagtatagccctgtggcactagagcagctcacaaatactcactccattcatcctgcagatatgttttgagcagccattctaccccaggactcttccaggcactggggatcatgaagtaaacaggatcacagaaacagaaacagaaggggctcggtgacttcatgaaggttaacactcaagggacaagggacgaggaaacacacattgctttatagacacattagatttatagaaatgataagcaagtgagtgtagttggaatgcacgggaagccagccaggcttcatttcagcagatgtactgacagaccctgcctctctgagttctgtccctggaagaggtgctaggcctgttgctaggtagctgggccatgctttgagggagctctgggcaacaccaaggagtagctgtgtgcctgggcttttttgggaatggcatctacatgaggctggctcctggggtgggtgtttagtcccaggctcttttagatttaatctcaaatctttgaccacaaagaagccatgtgacctggacaaatttgtgggggtgactcctgtttgttccgggggatattgagataccctttgtgtttttcgcagggaagctgaaaatacaatctctgtggatcggccagtggtaagtggttaggctcttaactatgagaagatatgggggtcacattccagcccaggcaggggcagtcaagtgtgcatggcagaaggaatgatgcttctgttatagaaccattttgctggtcagaagcaggagtgtggaagaggagaaaatattttatcaattagaggaaggcagctgggtttaggaagtgatggcaaggaaggctaatattggcttaagaggttggatcgcatctgatttctcacacagagaaaagggactaggttcaggacccagggtcagaacctgggtcattcaccttccaccttggtgacttggtcaagtttacagaacccctctgactcagctttctactctgtaaaatggggataatcataatcccctggccatgctggtggagtttagatctataagctcacacatgtgaaatgtcaggtgtagcatgtgcatcacaagggtatttctagatatccttcatgactgtggcttacatcatttcttcaaacatttggagaagaggacgagatggataaggttgtcatcccagcttttcactcgagaaggtggtggctcagtggggttaaatggcttcccttgcactcctggaggcaggaagtggcaggtagggcagcggagaagtttagagtcttgtgtgtgtgtgtgtgtgtgtgtgtgtgtgtgtgtgtgtgtgagtgtttcaggagagaggggtcggtgtaatggaggagactcaggtctgccatggaccttgtggctgttctccagagtgacttgacccaggacaaacgccccactgagtgtctttcaggtagtgactcccatgatcacaatgctggttccatgctagggctggagccaggtaccttcctaacaactgcacatcttattttagggttgggtgtgtcttgctcttcctcatcctttgggtgctggaacagcatagaatatgtttcaagagttgctcactcaaagatttcatggactgggagcgtggctgagtgtagaatgcttgcctggtattcacagggctctggattcaattctagtgctgcttaagagggaggagggaggctcatgggaacaggcatgtcatgagtactgcaggtcagtggagggggtctagtgtccttacatacctatgtttgtcaacagctttcaaataatacatggtgggccaggtgtggtggcacaagtgaatctctgtggtttcaaggcctacagagagagttccaggacagctagggctacacagagaaaccctggttttttgtttgcttgttttgggggatttttttgtattttgttgttgtttttaaagacactgggtaggggctcagctgacttgccacaggacattgctcgcccagtgtaattgccaaaccttccgattttacaaaaaaagccctaacctggaaacacatatgaatactccctgttacatgtttgcctaaatattaaaacaaaatctccttaaaaaaaaaacaacttcactttcacacaggtttgaatgagccacattttggcgaccaattctatttttaaggactggcaaggtcctttccctcctcagcatcggattagcagaacaaagcgtagcagctgtcagtcttgggatgtggcagaagaatactcttcctcctttgcactctgtgttctttaaaaaattgtattttattaatttattcattcattcgtgtatgtgcatgtcccaagcacacatgtgggggtcagaggacaacttgtggcagtcagttctcttgttttgctttgtggttcccaggggtcatttgggttgtcagtcttggtggcaagtgcctttacccctgagctccaattgattacaatatctggactccagagtcttgagccactggccaccctagaaacttgattttcacccattcctcatttactgtcccctttctatgcagaaaaagaaaaaaaacaaggtgagtgggccaggcactgtgcttatgtgtgcacatgcatgcatgtgtgtgtacacatatgtaacatgtggcacgtgtatgtatacttgtgtatatgcatgcatatgcatacacatgtgtaacatgtggcacgtgtgtgtatactcatgcatatgtatacacacacgtaacatgtggcatgtgtgtatacttgtgtatatgcatgcatatgtatacacatgtgtaacatgtggcatgtgtgtatatactcatgcatatgtatacatgcgtgtaacatgtggcatgtgtgtatacttgtgtatatgcatgcatatgtatacacatgtgtaacatatggcatgtgtgtgtacactgtggcatgtgtaagatgcacttcttcctcttttccttggagcctctgctgagttgggtgccctcgcaagtgcttcagctcagcctcacagtgatcctggactgtggttccattatcagtcctgtgtttagagggggaaaaggcagagacaaaccagtctccctgagaccacacttagccagggggttccacagagtctgtgctctgaaatacacagccgtcagacaaggtttggtgtgggtgcttatggtggtcctgaggaatctatctcagaggttctcctggcacgagtgctggtccagcccagagggaacatataccatgtgaagtgcttatagcaagcccctaccccactatataatagtatctataaggtagtcactgtttatgctttttataagtgagcgttcacattcagagaagcaaagtgatttgccacacagttagcaactggggacattggaaccacagtcccacatatgtctactccgagaccagtctcctgcctcacctccccagtgctccctacacttcaaggcttgtgttgtcaagattgcatgtgagtctataagcgcatggctggtagagatgccccatggctacaccctgcccactagtctgctcagaccgtcaccttcgcttgttctgagatcccaactagtttcatttgctttggcaagagccgttgtttataaaagcaagctgcggtctaaggagcctctcagagctaaacccgactctctctggtgctccccctgggtgagctgcacaggaacagagtggggcctccctgaccaggctgctttttttagtggaggctgctaagattatctgcactttggccccaagccctgctgtttcccaccacaccagcacaggcaggatgtggtggccactctctagctcttctgtggcctctgcacttgcatgaatatggccttaaggtagccctcctgcttctgcagtaccttcggggtttgcacagtaagtacagtttcactaaccctctggcttccgcagaggccctatcagaagggaaagtgaggttttaccaggtgcagtagcagatgagtgtgaacagccactgaaggtagttcttacatgaggggaggagggctgggcagagcagacatgccacaagcagcaggatatgagaggttcctggggaactgcggggccagagctctgttttctactaggatgaccttgaatttgtggtcattccctctgctagggttacagttgtgtgccaccacgaccagcctgaaagcctcatttttaatgggtttgacactgaatttctgggagacttcagtgtttttccacttgaaaaataaatccacaaaagtacttgataatcaccgatcacatcatctgtgctcagcattcttagcgcttttgcgtgttacttaggaacgcacaaggagaaatgggaggtgggatacaatagtggaccatccaacttatagaacatattagctgtttttaaaaatatgaataaaactgagaagaactgaggttcaagccacacatggtggtatacacaggggctagactgagctatagtgggatnnnnnnnnnnnnnnnnnnnnaaaggtccagaaaagtacatgtctcctagccacacggcttgtgagttcagaaatgggactcaggcttctgagtgaccatttcctcctgagtggacaaagctgcttcaggggtcgtctgcctcttgtgtccgtcagcctgtaatacttgcttccctcctgcccgcccctttccctcccctcccctccccagcccatcatcttcgtttctgacagagcaaacagcaacaaggagctgggtgtggaccaggaggcagaggagggcaaagacaaagcagggcccgagaaacgaggggaaaccccacaggtttctgagcatgcggcatggatggggagtttagctcgtagtggcggctctgctatgctcttggggtccttaggggttatggtagctctcaggggagggtctcttcagcactgtggggtttggaattgtctgctgacttttcctcccggcaagttcctctgaactttgcaggtatttcttgggtaagtgtcttttaaggtcgctgccacaccaaaccagtcccagggtgggaaggataggccaagaacagcccactgacgcctctccagccaggacaatggagcatgggaagacaaaggctgagtgaggcaagccagctgcagagaacgaagctgaactgtctttgagttgttgcaaagggaggaaaaggggatggtagcagaaagtggggtctgacagcagccctgaagtcctgcagaactccaggaccacgccctccatccaagagaacctaccaggtggggagggaggggtcctttaaggacttagctacagagacagtagcggttggaggacctggcctctggtcaggctcaaaagagcagagaaagttctatctggaagagagtcgggagagtcaaggatgctgtctgcacgttagcatggcaaatttgtcctttggcctgaggttccgggactgcagagcctctagaatcctcactgagtttgcaggtagactgaaaacatgaaccttgtgccacctgctgctgctttatggggctgtttgggatactgacgcctgggttcccataaaccagtttcctttgtgtccctatagccaaggcctggccacacagaccaggaaagtgaggagcagcagcaattccggaacatcttcaggcagatcgcaggcgacgtatgtatctctatcctagcccagggacccacctcctcaacgactcatcgtctaaaaggggtcatttgatgtgggagaaccagagaatgtgtgatgcatcaaagaaacctgtgcctttgggttcaaccactgactgggtggctcagagccttctggctgtgagctgcctgctgcactggcctttacaattctcttctctccctcaggacatggagatctgtgcagatgaactcaagaatgtcctcaacacagtggtgaacaaacgtgagcgacccacgccggatgtgggggatgggcaggggccccagctgtctgaaagcagctcctcacccttctccatccccccagacaaggacctgaagacacaagggttcacgctggagtcctgcagaagcatgatagctctcatggatgtatccttccatctgcccagagggtcaggggaacagttaagggtgtccacgcccagggaaagacttaagggaatcctaacacagatactcctggatatctggcagaggttaggaatggatactgggtagtggctggtcatcacctctggctcttaccacagatttgaaaccctgcttggcatgctgcccaaacttcctagcgggcaggctctgtgagctgtaaagctggcaggaactctggttaagggaggatagaacctggcagagtcaggggccctggtaaaggtggtttaaccaccttccctgcatagtgccctagacacccccaccccgttcagaggcattttactatgtgcctgtggtccttacatctatcctctagacagatggctctggaagactgaatcttcaagagttccatcacctctggaaaaagatcaaggcctggcaggtgcgatgagagacggatgtgggaatgatggacagggttaatttgggattaagtgtgtgattgctgtctttgaactttgtattttcagaaaatcttcaagcactatgacacagaccattccggtaccatcaatagctatgagatgcgaaatgcagtcaatgatgcaggtgctggggtgcaggggatgctggggggttgagagggtgacaacatgcagacctgagagctgggggaagcaggaggggatgggaaaggagactgcaagcctgagaacttcatccctccctctccctgcccctccaaggcttccatctcaacagccaactctatgacatcatcaccatgcgctatgcggacaaacacatgaacatcgactttgacagcttcatctgctgcttcgtcaggctggaagggatgttcagtaagtgaggggctactccccagatttctcaagccccccccccaggctccttcctcatagtacagccacaacaagagctcagcctgacagttgcccactcttccactgaggctgcatgtcagccgttactctctgaaggccaagaaaaggatggcaaagggagacgaaagatgcaagggagagatagatgctggttacgtcctgcatggatctgtgtggaaggatagcactcagcacagaggcttcttaaattacagatctgagcactcagatgatgctcacgtgtgatcccagcagttaggtaggagagataggaggattatgaattcaaggccagcaggggctacttggagagaccttgtttcaataataaaacaagggctggcaagatggctcagctgcatggctctggtggtctgagtttaatggctgaaatccatgaggtagaaggagaaaaccaatctcagagttgcccctctgacctctacatatgttctgtgcccacatgcatacagtaataaattcttcaagcagcaaacacaagtaaactaggtccaaaccctaagaaaaggaatgggaggtgacaaatgagagtctgtgactagcatttgctttatgctttcacacaggagcttttaacgcatttgacaaggatggcgatggtatcatcaaactgaatgtacttgaggtaagtgcagcaaacacatcctctgcacagaacccacagggggtggggagggatgaatgacaggcagaacccagcacgcttctcactctcaggactggaacttggtgaagattgcgattcctggggtgggtgtacaacagaggctagccccacctctgagttgcacctcggtggaagatactttcctagggaagacccagggaaggcaggctgctcctttaagactcctcccctttctccgtcccagcacaagcaattcctagggatggttgttacctccttgttttctcttgtactgatctcagggtttcttcttccagtggctgcagcttaccatgtatgcctga

SEQ ID NO: 447 - DNA, 2358 bp, Mus Musculus
atgccaactgttattagtccaactgtggccccaaggacgggggctgagcccaggtccccagggccagttcctcacccagctcaaggcaagaccaccgaggctggaggtggacacccaagtggcatctattcggccatcattagccgcaattttccgatcatcggtgtgaaagagaagacatttgagcagctccgcaggaagtgcctagagaagaaagttctttatctagaccccgagttcccaccggatgagacctctctcttttacagtcagaagttccccatccagttcgtctggaagagacctccggaaatttgtgagaatccccggtttatcattggtggagccaacaggactgacatctgccaaggagatctaggggactgctggtttcttgcagccatcgcctgcctgaccctgaatgagcggctgcttttccgagttataccccatgatcaaagtttcactgaaaactacgcagggatcttccacttccagttctggcgctatggagactgggtagatgtggtcattgacgactgtctgccaacatacaacaatcagctggttttcaccaaatccaaccaccgcaatgagttctggagtgctctccttgagaaggcttatgccaagctccatggctcctatgaagctctgaaaggtgggaataccacagaagccatggaggacttcacaggaggggtgacagagttttttgagatcaaggatgctccgagtgacatgtacaagattatgaggaaagctatcgagagaggctccctcatgggctgctccattgacgatggcacgaacatgacttatggaacctctccttctggtctgaacatgggggagttgattgcacggatggtgagaaatatggataactcgctgctcagagactcagacctggaccccaggggctcagatgacagaccgtcacggacaattgttccagtgcagtatgaaacaagaatggcctgtgggttggtgaaagggcatgcctattcagtcactgggctggaggaggccctgttcaaaggtgagaaggtgaagttggtgcggctgcggaacccctggggccaggtggagtggaacggctcttggagtgatgggatgtcatatgatgacttcgtctaccatttcacgaagctggagatctgcaacctcacagctgacgccctggagtccgataagcttcagacctggacggtgtctgtaaacgagggccgctgggtgaggggctgttctgctggaggctgccgaaacttcccagacactttctggaccaacccgcagtaccgtctcaagcttctggaggaagacgatgaccctgaggactctgaggtaatctgcagcttcctcgtggctctgatgcagaagaaccggcgcaaggaccggaagctgggggccaacctcttcactattggcttcgccatctacgagatgcacgggaataagcaacacctgcagaaggacttcttcttgtacaacgcctccaaggccagaagcaaaacctacatcaacatgcgggaggtgtcccagcgcttccgcctgccacccagcgagtatgtcatcgtaccctccacctacgagccccaccaggagggggaattcatcctccgagtcttctccgaaaagaggaatctctctgaggaagctgaaaatacaatctctgtggatcggccagtgcccatcatcttcgtttctgacagagcaaacagcaacaaggagctgggtgtggaccaggaggcagaggagggcaaagacaaagcagggcccgagaaacgaggggaaaccccacagccaaggcctggccacacagaccaggaaagtgaggagcagcagcaattccggaacatcttcaggcagatcgcaggcgacgacatggagatctgtgcagatgaactcaagaatgtcctcaacacagtggtgaacaaacacaaggacctgaagacacaagggttcacgctggagtcctgcagaagcatgatagctctcatggatacagatggctctggaagactgaatcttcaagagttccatcacctctggaaaaagatcaaggcctggcagaaaatcttcaagcactatgacacagaccattccggtaccatcaatagctatgagatgcgaaatgcagtcaatgatgcaggcttccatctcaacagccaactctatgacatcatcaccatgcgctatgcggacaaacacatgaacatcgactttgacagcttcatctgctgcttcgtcaggctggaagggatgttcagagcttttaacgcatttgacaaggatggcgatggtatcatcaaactgaatgtacttgagtggctgcagcttaccatgtatgcctga

SEQ ID NO: 448 - protein, 785 aa, Mus Musculus
MPTVISPTVAPRTGAEPRSPGPVPHPAQGKTTEAGGGHPSGIYSAIISRNFPIIGVKEKTFEQLRRKCLEKKVLYLDPEFPPDETSLFYSQKFPIQFVWKRPPEICENPRFIIGGANRTDICQGDLGDCWFLAAIACLTLNERLLFRVIPHDQSFTENYAGIFHFQFWRYGDWVDVVIDDCLPTYNNQLVFTKSNHRNEFWSALLEKAYAKLHGSYEALKGGNTTEAMEDFTGGVTEFFEIKDAPSDMYKIMRKAIERGSLMGCSIDDGTNMTYGTSPSGLNMGELIARMVRNMDNSLLRDSDLDPRGSDDRPSRTIVPVQYETRMACGLVKGHAYSVTGLEEALFKGEKVKLVRLRNPWGQVEWNGSWSDGMSYDDFVYHFTKLEICNLTADALESDKLQTWTVSVNEGRWVRGCSAGGCRNFPDTFWTNPQYRLKLLEEDDDPEDSEVICSFLVALMQKNRRKDRKLGANLFTIGFAIYEMHGNKQHLQKDFFLYNASKARSKTYINMREVSQRFRLPPSEYVIVPSTYEPHQEGEFILRVFSEKRNLSEEAENTISVDRPVPIIFVSDRANSNKELGVDQEAEEGKDKAGPEKRGETPQPRPGHTDQESEEQQQFRNIFRQIAGDDMEICADELKNVLNTVVNKHKDLKTQGFTLESCRSMIALMDTDGSGRLNLQEFHHLWKKIKAWQKIFKHYDTDHSGTINSYEMRNAVNDAGFHLNSQLYDIITMRYADKHMNIDFDSFICCFVRLEGMFRAFNAFDKDGDGIIKLNVLEWLQLTMYA

SEQ ID NO: 449 - DNA, 2100 bp, Mus Musculus
atgccaactgttattagtccaactgtggccccaaggacgggggctgagcccaggtccccagggccagttcctcacccagctcaaggcaagaccaccgaggctggaggtggacacccaagtggcatctattcggccatcattagccgcaattttccgatcatcggtgtgaaagagaagacatttgagcagctccgcaggaagtgcctagagaagaaagttctttatctagaccccgagttcccaccggatgagacctctctcttttacagtcagaagttccccatccagttcgtctggaagagacctccggaaatttgtgagaatccccggtttatcattggtggagccaacaggactgacatctgccaaggagatctaggggactgctggtttcttgcagccatcgcctgcctgaccctgaatgagcggctgcttttccgagttataccccatgatcaaagtttcactgaaaactacgcagggatcttccacttccagttctggcgctatggagactgggtagatgtggtcattgacgactgtctgccaacatacaacaatcagctggttttcaccaaatccaaccaccgcaatgagttctggagtgctctccttgagaaggcttatgccaagctccatggctcctatgaagctctgaaaggtgggaataccacagaagccatggaggacttcacaggaggggtgacagagttttttgagatcaaggatgctccgagtgacatgtacaagattatgaggaaagctatcgagagaggctccctcatgggctgctccattgacacaattgttccagtgcagtatgaaacaagaatggcctgtgggttggtgaaagggcatgcctattcagtcactgggctggaggaggccctgttcaaaggtgagaaggtgaagttggtgcggctgcggaacccctggggccaggtggagtggaacggctcttggagtgatgggatgtcatatgatgacttcgtctaccatttcacgaagctggagatctgcaacctcacagctgacgccctggagtccgataagcttcagacctggacggtgtctgtaaacgagggccgctgggtgaggggctgttctgctggaggctgccgaaacttcccagacactttctggaccaacccgcagtaccgtctcaagcttctggaggaagacgatgaccctgaggactctgaggtaatctgcagcttcctcgtggctctgatgcagaagaaccggcgcaaggaccggaagctgggggccaacctcttcactattggcttcgccatctacgagatgcacgggaataagcaacacctgcagaaggacttcttcttgtacaacgcctccaaggccagaagcaaaacctacatcaacatgcgggaggtgtcccagcgcttccgcctgccacccagcgagtatgtcatcgtaccctccacctacgagccccaccaggagggggaattcatcctccgagtcttctccgaaaagaggaatctctctgaggaagctgaaaatacaatctctgtggatcggccagtgccaaggcctggccacacagaccaggaaagtgaggagcagcagcaattccggaacatcttcaggcagatcgcaggcgacgacatggagatctgtgcagatgaactcaagaatgtcctcaacacagtggtgaacaaacacaaggacctgaagacacaagggttcacgctggagtcctgcagaagcatgatagctctcatggatacagatggctctggaagactgaatcttcaagagttccatcacctctggaaaaagatcaaggcctggcagaaaatcttcaagcactatgacacagaccattccggtaccatcaatagctatgagatgcgaaatgcagtcaatgatgcaggcttccatctcaacagccaactctatgacatcatcaccatgcgctatgcggacaaacacatgaacatcgactttgacagcttcatctgctgcttcgtcaggctggaagggatgttcagagcttttaacgcatttgacaaggatggcgatggtatcatcaaactgaatgtacttgagtggctgcagcttaccatgtatgcctga

SEQ ID NO: 450 - protein, 699 aa, Mus Musculus
MPTVISPTVAPRTGAEPRSPGPVPHPAQGKTTEAGGGHPSGIYSAIISRNFPIIGVKEKTFEQLRRKCLEKKVLYLDPEFPPDETSLFYSQKFPIQFVWKRPPEICENPRFIIGGANRTDICQGDLGDCWFLAAIACLTLNERLLFRVIPHDQSFTENYAGIFHFQFWRYGDWVDVVIDDCLPTYNNQLVFTKSNHRNEFWSALLEKAYAKLHGSYEALKGGNTTEAMEDFTGGVTEFFEIKDAPSDMYKIMRKAIERGSLMGCSIDTIVPVQYETRMACGLVKGHAYSVTGLEEALFKGEKVKLVRLRNPWGQVEWNGSWSDGMSYDDFVYHFTKLEICNLTADALESDKLQTWTVSVNEGRWVRGCSAGGCRNFPDTFWTNPQYRLKLLEEDDDPEDSEVICSFLVALMQKNRRKDRKLGANLFTIGFAIYEMHGNKQHLQKDFFLYNASKARSKTYINMREVSQRFRLPPSEYVIVPSTYEPHQEGEFILRVFSEKRNLSEEAENTISVDRPVPRPGHTDQESEEQQQFRNIFRQIAGDDMEICADELKNVLNTVVNKHKDLKTQGFTLESCRSMIALMDTDGSGRLNLQEFHHLWKKIKAWQKIFKHYDTDHSGTINSYEMRNAVNDAGFHLNSQLYDIITMRYADKHMNIDFDSFICCFVRLEGMFRAFNAFDKDGDGIIKLNVLEWLQLTMYA

SEQ ID NO: 451 - DNA, 2388 bp, Mus Musculus
atgccaactgttattagtccaactgtggccccaaggacgggggctgagcccaggtccccagggccagttcctcacccagctcaaggcaagaccaccgaggctggaggtggacacccaagtggcatctattcggccatcattagccgcaattttccgatcatcggtgtgaaagagaagacatttgagcagctccgcaggaagtgcctagagaagaaagttctttatctagaccccgagttcccaccggatgagacctctctcttttacagtcagaagttccccatccagttcgtctggaagagacctccggaaatttgtgagaatccccggtttatcattggtggagccaacaggactgacatctgccaaggagatctaggggactgctggtttcttgcagccatcgcctgcctgaccctgaatgagcggctgcttttccgagttataccccatgatcaaagtttcactgaaaactacgcagggatcttccacttccagttctggcgctatggagactgggtagatgtggtcattgacgactgtctgccaacatacaacaatcagctggttttcaccaaatccaaccaccgcaatgagttctggagtgctctccttgagaaggcttatgccaagctccatggctcctatgaagctctgaaaggtgggaataccacagaagccatggaggacttcacaggaggggtgacagagttttttgagatcaaggatgctccgagtgacatgtacaagattatgaggaaagctatcgagagaggctccctcatgggctgctccattgacgatggcacgaacatgacttatggaacctctccttctggtctgaacatgggggagttgattgcacggatggtgagaaatatggataactcgctgctcagagactcagacctggaccccaggggctcagatgacagaccgtcacggacaattgttccagtgcagtatgaaacaagaatggcctgtgggttggtgaaagggcatgcctattcagtcactgggctggaggaggccctgttcaaaggtgagaaggtgaagttggtgcggctgcggaacccctggggccaggtggagtggaacggctcttggagtgatgggatgtcatatgatgacttcgtctaccatttcacgaagctggagatctgcaacctcacagctgacgccctggagtccgataagcttcagacctggacggtgtctgtaaacgagggccgctgggtgaggggctgttctgctggaggctgccgaaacttcccagacactttctggaccaacccgcagtaccgtctcaagcttctggaggaagacgatgaccctgaggactctgaggtaatctgcagcttcctcgtggctctgatgcagaagaaccggcgcaaggaccggaagctgggggccaacctcttcactattggcttcgccatctacgaggttcccaaagagatgcacgggaataagcaacacctgcagaaggacttcttcttgtacaacgcctccaaggccagaagcaaaacctacatcaacatgcgggaggtgtcccagcgcttccgcctgccacccagcgagtatgtcatcgtaccctccacctacgagccccaccaggagggggaattcatcctccgagtcttctccgaaaagaggaatctctctgaggaagctgaaaatacaatctctgtggatcggccagtgaaaaagaaaaaaaacaagcccatcatcttcgtttctgacagagcaaacagcaacaaggagctgggtgtggaccaggaggcagaggagggcaaagacaaagcagggcccgagaaacgaggggaaaccccacagccaaggcctggccacacagaccaggaaagtgaggagcagcagcaattccggaacatcttcaggcagatcgcaggcgacgacatggagatctgtgcagatgaactcaagaatgtcctcaacacagtggtgaacaaacacaaggacctgaagacacaagggttcacgctggagtcctgcagaagcatgatagctctcatggatacagatggctctggaagactgaatcttcaagagttccatcacctctggaaaaagatcaaggcctggcagaaaatcttcaagcactatgacacagaccattccggtaccatcaatagctatgagatgcgaaatgcagtcaatgatgcaggcttccatctcaacagccaactctatgacatcatcaccatgcgctatgcggacaaacacatgaacatcgactttgacagcttcatctgctgcttcgtcaggctggaagggatgttcagagcttttaacgcatttgacaaggatggcgatggtatcatcaaactgaatgtacttgagtggctgcagcttaccatgtatgcctga

SEQ ID NO: 452 - protein, 795 aa, Mus Musculus
MPTVISPTVAPRTGAEPRSPGPVPHPAQGKTTEAGGGHPSGIYSAIISRNFPIIGVKEKTFEQLRRKCLEKKVLYLDPEFPPDETSLFYSQKFPIQFVWKRPPEICENPRFIIGGANRTDICQGDLGDCWFLAAIACLTLNERLLFRVIPHDQSFTENYAGIFHFQFWRYGDWVDVVIDDCLPTYNNQLVFTKSNHRNEFWSALLEKAYAKLHGSYEALKGGNTTEAMEDFTGGVTEFFEIKDAPSDMYKIMRKAIERGSLMGCSIDDGTNMTYGTSPSGLNMGELIARMVRNMDNSLLRDSDLDPRGSDDRPSRTIVPVQYETRMACGLVKGHAYSVTGLEEALFKGEKVKLVRLRNPWGQVEWNGSWSDGMSYDDFVYHFTKLEICNLTADALESDKLQTWTVSVNEGRWVRGCSAGGCRNFPDTFWTNPQYRLKLLEEDDDPEDSEVICSFLVALMQKNRRKDRKLGANLFTIGFAIYEVPKEMHGNKQHLQKDFFLYNASKARSKTYINMREVSQRFRLPPSEYVIVPSTYEPHQEGEFILRVFSEKRNLSEEAENTISVDRPVKKKKNKPIIFVSDRANSNKELGVDQEAEEGKDKAGPEKRGETPQPRPGHTDQESEEQQQFRNIFRQIAGDDMEICADELKNVLNTVVNKHKDLKTQGFTLESCRSMIALMDTDGSGRLNLQEFHHLWKKIKAWQKIFKHYDTDHSGTINSYEMRNAVNDAGFHLNSQLYDIITMRYADKHMNIDFDSFICCFVRLEGMFRAFNAFDKDGDGIIKLNVLEWLQLTMYA

SEQ ID NO: 453 - DNA, 288563 bp, Mus Musculus
  misc_feature (1)...(288563): n = A,T,C or G
atggagcagacttccaatttggggcttggggactcatcgctgttccgctacctggatggagaactctggagccttaagaacgagcttcgcagagccctggagagctctcctctcttccagcccaggtacttagtggagttgcgactcttgttcgagcctaggttagctgattggccccaggtggggctggatggggtgtggaccgctccttatgggcagttgaccttatccttacctctgataaagaagggatctcctagtagaagaagtgtggtcacagcctgctgccgccttcctgatcccctaaaggtgtcccttccaccacagctctctccaaagatcccaggttgaggtgtgggctccgcagggttaggtactgagactcattgtgcatcttgttcccgcctggccagtcagagtcccacctagggccggcagaaccgaggaaaaacaaagatcgggtgcgcaaactgggatggacaccccgctggggtggggtgcaaactgaagtctctggcgggctagtggattcaggtgtgctagctcctagaaactgaggaaggacaagcggggccgtgttggctgggggaaggaggtgctaggtccttgacaccgtgcagcttaaggttacgggtgtagaaaaatggactagtcacgagggtcaggaatggaccccagcactggggttctttctcctatgttctgctgggtgattgactgaccctgtttcaggaattctgagaagcccgattgcagccactttggagcattagcataataaaagtcctgatttagaatgtcaatatcgccctagtaatcctactacttaggaagaggaggcagcgggaccaggaattcaaggtcattctcagcttctggacgtccagaccagcggaggccacagataccctgcctcaaaaacaaaacaaaccgcaccttaaaacagacaaaactaaacaaaagtctgtatgttccagggagaattagccgagccctcctgcccaggtagctcaagtttaatttgtctctcaagagcggtctgggcagagggaaggtggtcctccaagtgttctttgagaagaccctaggtgcatctttgaatgtcacccttactcctcatccctttcgttcactcttaaggtcatggtcctcaaagtgtggtccaggtatctagaggatacccaggactgcttcaggaagtccaccaaggtcaggattatttctataaatgtcccaagatgctattggctctttgcacgcacacattcccaccaatacacagtaatgggttctggacacagcatgactggcagtatcctctgtattcattgagaatgtgagattccacaggctttctattaagacagatatttaaaaaattatgaagatgcagaacagctgtacttttcttctcaactttgttttgttctgaaaaacagttatttttaaaaaaatacacttaacagatatactacatttactttcaaatgagttaagggtttgaaaccttttctgtaatggtgtctaggaggataaatattaataaacataactcaaccaaacaaaagcaattgaggggtctcattttaggatttcaggggccctttagcctatattcacttatgtattacccaacctttatttctgggcagtcggctcttggatgtttctgtttggataactgcattttaaagcatggagcagaattctaagatctaaaccgctatttgggctaaataagagatgacctacttaagaatcaacactgctactacctctgaggaacagaggtattagacaagcctgggttctaaagccaccaggtagctgacttccttgtgtaatattggggtaattcccaacccatacctgcaaccctgagcttctggctgaaggtgtaactcagctgtagggcacatttaacaggttcaacccacaatatcacaacaaaataaaaacacagaaaaacactcccagttccttggttgttgtgaagcataaatgaaacactcctgagtaagcattctgggaacattggttggtgctgtcctagttagggttactgctgctgcgatgaaacaccacaaccaaaagtaaacgggggagtaaagggtttattggcttacatttcctcatcattgttcatcattggaggaagtcaggacaggaattcaaactgggcaggaacctggaaacaagagctgaggcagaagccatggaagagcgctgcttactggcttattttccatgacttgctcagtctgctttcttctagaacccaggaccaccagcccagggatgacaccacccacaatgggctgggccttcccctgtcaatcactaattaagaaatgccccacaggcttgcctgcagtcccatattatgaaagcattttctcaaccgaggttccctcctttcaggtgacttttagcttatataaggtgacataaaactctgcagcacaaatgtatctcccttcttcttcccctttacacacacaggggaacgagacaaaacctcactatcccggtgttttgctattgttatttgtttatttcatagtatcagaatcataatagcatagatgacattttactgtctccctctccaatggctcaagattctgatacctatatgaaagttcactttgtgctaccagatttaatctttatgaggttggaaagacagggctcttatttctggatccactctactattgcaaaagtttcctggaagatataaccatgaaacctgtctgtcctgcaattaatccctgtcctcatcctccatcagggagcctttgccattcaagtaggtgataggggtggggtggagattatgggagcccagttctttgagtgctctgtacatagtgcaaagtttgtctaaggtcaggcactctcagagcatgcgtctaggaaacatttttctccccaaagaaaataattatattgccaagggttttggatccagaacacatagggctatgtgtgtcagcataatgtatatattttataatttacttgtctattaaagatggcaataagggtaaattgtaaaaagaaaaggcagatcaaatcattgggaaggggacggataagatttggtaattacagcaaccatttctgcatctaatttgaggaattgccttgaaggtgctggtgaagcagccttcacctcctctgcttctcactaagcacagtcttagtgaagtaagcatctgtccttcccactcctcctctcagcatcatcatcatcaggttctacctttgggcacaaagtgtgatttggggaaggctgacctgtcacctcactgcaacctggcatctgtaaccctgtctccttgacacccttcacatacacacacacacacacacacacacacacacacacacacaccccacctcatgctttaaggctatttcaggcatagccattctctggccacagggtcatgttccctggttttggccaatgcaataggaggagaggcttttgggttgctcctcggaaagatacttcattggttattccagagacctgtcagcagtgaatactttgttttggacaggatggagtttaaataggaagctgctcctcctgcagccagttagttacaagggacgccagcctcacaatggagtgacccatggagaaggatagagggacactaggctttgaaatatccttgagtacatggtcgagacttagcaaccaggcaggaagactgaaacactggtatttttagcttggccccagtccaccatcactgacacagttggcagtcaccttttcttgaaatggctaccagagttgaaatcaaggaatggcacaggctagacagtgtttgctcggatctggaatggagtcaccaagtagagccatgagactgggagagaagaaatgagcatctgatgaaggaacctggggcaacacaactcaggtgacagagcagatgctaatgggtgctaatgctacttacaaagacgttgtggctcttaggaaccataaccaatagcaagaacgtctgccaaggattttcccagttgcagcttcttcagatgagctacacatacagcttgcattgcctttaaaagcttccatttgccttgcttccttcctataacatgtacaacctgcattataaagccctgctactccaggaagaaattccatggggcattccttagagagcatccctctgttatttaggatagtaatagacaatatatctgctttaatnnnnnnnnnnnnnnnnnnnnagactggtgtatgggtaaagaggtcactgagacctgttcctacctgttctgcagatggctgcaattctgagtgtttgggggctaattcttaattaaagtcatactctgttgtgatcataaaatttcaagccctttttgggtctctgcaagggcttgagattcttttgccaccacctagttgtgtgtttaatgttcatttcctttgttgtatggaggtgtgggggtgggtgggtagtgtgtgtgtgtgtgtgtgtgtgtgtgtgtgtgtgtgtgtgtgtgtgtatggggtgggaatatatatatatatatatatatatatattaatattagtatgtatggggtgggtagacaagtatgcagatgtgcacacatgtgtgtgcatgtgtatgtgcttgggtatggaagccagaggataaactcgggtggtgttcatcaggccttgtccactgttttgtctcaggtaaggtattgctaagtagacctggctctgacaactgaactctgttcctttgcaagagcagcagctcctaactgatgggccatcatctctccatctcctagagatttttattgtagaacacttttcagtgcagagcaaagctatggagagtgaagatagttcccaggtctccctcccctgttaatatcttacattagcacagacagtttgtcaaaactaaggtgaccacactaacctgctagtactaattaaactcaagattctataatgcttccttagctttcccataggtcttctgttcccattccaggatcctgtcctggacatcgtgttgtatgtattgtcaagttcccttagtgtgctcttatctgtgacatttcttctctctcgtgttcttctgccttgttatctttgtggaaaatttaccagactttgtattagtcaggtttatattcttgtgataaaccttggtcaaaagcaacttggtgggggaagagtttatttgctttatatgttctaatgaagagactatatcgtggtttgtcatgaagtaaaggaagggtagtaactgaaggcaggaacctggaggaaagaagtgactcagaggccatggagaagtgctgcctactggcttgctcaacatggcttgctcagtctgctttcttatacaatccagagttgaatgcctagggtggtaccacccacagcgggcctataagagccttcttttcatcaaggagtctttgtaagtagagcagaggaccatagtgattgaggatacttcttcaccccttgcctggcaacctctgccctaccctttaggaggtatccgctgctttgttagccctccttcctgttataggtttgttttgtctgtttttagaatttaatataactagactcatgcaatttgttccctcagcttatttttatggcatattctagtttaatgattcaatcctagagtgaaaatgagtgagctatggacacaacagtcactgaagacaacttagccattctgagtgccagaagccagacacaaaagaacacatagtgtataatccaatttctttaatattcgaaagaagtagacagtcatttatagagttgttaagcagccagcattggtcaggagagaggaaatagaggttgacagggaaactgagaacaccttttcccccttgccctgggtgggggttacacaggcaaatctactttgcactaatttcctgagacttaacttataatccacacctttgttcttgacacattgtattttcttagagtatttttttttttagaattaagatactagaaaggaaaaaggtaagattcaagtccctaccctccaattttgtatgtgtgtgtgagacaatgcatatgcttattatcttttgataagtaggtagttactccaaagtgtagcaggcatgttgtctcacatgcattccagccagagggattaaaggtgtgtgctaagggctgagccaccccacaactagaaatagtttgtttgtttgttttaaaataaataagacaatctcagaggtcacagtgtgatcaaatattctgcactgtctgtagaatgagacaggggagcagtatctgtcacatcttcatatcttacagactcaggaaaaccgaaaataggaattatagctgtgaaaatactaaataattaggtatgacttatatgccactgttatacaaacaatatttgaagtaaccaaagaagtgttttaaataaggagaatataatatcaacccttcattttgcttagagtgcttgtgactgtttctgcaactcttgtttctctgatgcacagtctcattccgctgctttagagactgttagaaatttaggtgtactactgtgattaacaaatattcatgtttccaggttcccaaaatgcttattcatccagcttagatttctcaacttggtcagtcacaatgacagttcgcatgaagaacaagttccacctagtggcaattttaagtatatattctgacatgcattttatgagctatgaagagggctcacttttactgccaaacccgatgaccatgatccacagaacccatgctgtgcaaggagagcatcagttcttgtaagttgtcttctcatctctacatgcaagccgtaaggctttcaaagtcagacgttcattgccggaggcattcaagttgagttacatggtgtgctgctttaatccccagagggatgaaatccactacttaatcccacggggtttctgcagctgttgtaacttgtcctccagcccctgtgagtggcaatagtagataagagcagaggctttgggttctggcaccctcagctttacagaaacaagtgtaaattgtttacacaatttaccagagctcccaggcagctggtattagggctctcagcctaggatctctgagaccttggtcctcaaagcttggaagttccccaggacctttccagcaaccaggatccacagtttttcttctctagctttcacaaacttctgttaatgttcattttaggctctttgccctatcttgcttcctgcttccactatccccatcatttgtattctagatgttctttgaaactctgtagctgcccttggtcactgcagctactgatggccactccctttgcagctgctaccacaactcagctagtgcttctgttgttacctttatgttactagctctgcccaccctcctaaggataaagatcaagataaggggagagaagaccactcaagagaagcccaaattggaggggccagagaatgtttagggtgaatgctttatgtgatattggctgcatgcaactataaatttgtctagactcatagactataacccatcagaaacaaaccccaaggtagtaagaaattatttggtatcctggcctttggttattgagttcctagataaaacacacacacacacacacacacacacacacacacacacacacacacagagagagagagagagagagagagagactttatatttgcaataagccaataagccttaagctgcacaatagctgggcagctgcctaccctccatgctgttacaatctactttcctattgataaccccagttgttacttactatttaatatgttctatttgagctgctcataactcccttggagccacgtttttatgactcagctaacccatagtggcttctcctttctcttctcctgcaccttcttcctttatcctatggtggcttcttcctcttccttctcctcctggtcctctctgacccaagcccacaaaacctcaaccccacctatgtctcttctgcccaactattggctatttatttaccaatcacaattaactgggggcagggtcacttagctagcagattctctgggagaaccagttttgggggcccaaattagcattagaatacaagcatcatcagggcagccctctacatctaggagctggagttggtggttaagagcacttgctgctcttcaagaagacccacgttcagatctcagcacccatgtcccacagatcacaattacctattaactcaagctccaagggacccacaccctcttttgacctccctggaccctcacacacatgttacacaaagatctctcacacacacatatatacaaggcacaaatgcacacatacacattaaaataattgtttttctcaattccaagcaactctataaatgtagtttgttttatttttcttaaaaatacaatgcatacttgaacctgaccaccatttagttttgagtagaatggcacacacacaagtaatctctgggagacatggttgtcaaatatgccaagtgggaagaaaataagccagtcacaaaaatgttaaaaagcaaaaccatctactcttcaaaaaggcaacatgtagacatcgtatggcttcaaaaagtaaaggggggccaccaagccaaatctttctgtagtcatttaaaggatggacttgtgagactgtcttaattatttccctccatccattagggatggtttccctgactttaagacccgttttgatcgttctttggttcctgagcgagggaaaaccgcgagcccctccctcagacctctatggcttcagatgatgttaccatccctgtaggtctttccctttgcattggttctctcaagttgtttgcaagattcttttgcttttagtttttagaaacttaattgtgacacatatccgtccattcgggaaagttctgtcgaagtgatagactcctctcccgaagctcccacccccaaatgcttcactttgggggctcagagttaacatctgaaaagggagagggtggtggtgatggttcacacctttaatcccagcactggaagtagaagcagactgaattgtgagttccagcccaacagcacagagccagtagacagccagaactatggagagaaaccctgtccttgagggcatggggatgaagggagaaagacaagaaagaaaggagagagaacacatcttcagacttagagctttctcatggcgtcacagactcatgttctgtcagctacaggcactaatttcaccagagaagtgcttttatttatttattttttaaattaattttggctaccaaattttcagttctataatttctatgaatgcctttttttttcttaaaaaaatttttttttttgtatttctttggtgagaacctttcctatttgtttcaagagagttggaatttgcttactataacattagtttgaggtttgttttaagatcatgactttaatattccagtgtctgattcattttggaattgtcatcacacaaacactgacagtatcaaacatggatgggctctggacttttgccatgattttaatggagatatttggatgacagagagaaactcctccttccagatttatgctttttgagaaacagacactaagatagagctagacatgccagaaatttaatggtgggcactgtctgtgaaggacaaaaacactggaggattggtgagagaaacctccaaagtacagtgggcaagatggacgctgagttgggagacaggaagattgcatctaggattgtctccaatatggcaaagcctaagtctttgccacagttttgacagaatgtgaatggaaaggagaaaggcaatgtttcttactggacttagttttgaccctactaggaccttgtcaagctaggtcatctgcttgaaaatcctacgaggagggtaacttcccagtagactctcagcttcattcaaaagatggcagaacttcaccaattgactgaacaattctctttacactaccacagtcctctccttataccactgggttccactctctgcccccgcccccacagattctgccttctggctattctagactttgaagtgtctgcagtctttcagctctgtagtgaagaaggagctgcagtgtaattttaacagaatcttatcaggaaatccccccttccagcacccatctgactcaggagttgttacacaggaacaggacaaaagattgttctcttagagctctgggtttgtttctggcaacttacagactcaaggtcagtaacacctcagtgtcctaatgctcacgtggtatttctattctgtacaggtatgatttaagtttggaggaaatgagagctttgacgaatcagcgagtgaagtttgtcttgagtctccctgtggtaaagcatgtactcctggatcaggtaagtgtcatcgctatttctgcatgaatgtgtgtgtgaatatgtctatctctctctgtatgtgtgtatgcatatgtacatacatacacgcactcgagagagagtgtgtgtgtgtatctgtgtgtgtgtgcatacacgaacgtgcatgcacacacatgcatgtgcatgtgtgcatgtgtgaatctctctctgtgtgtatgtatatatgtgtgtgtgcctgtaagcaagcaagacatgttttgtttgatttgcttttgtgacttatgtaagctcctggatcatggcctgaagcacactaacaaagtcattgtaaagcagtgttctctggagccccctttctgccttctggaccacatagttactcttcgaagttcacagactagagaaaaaaatgagtcacagaagtaacaaaatatccattcctaaaaccaatataacttggagcatcaaataaaaactgctgacaaataagaaacaatgtgtttaaaaaacatttgaaatattttaggcctgtctggagtttatgagtcttggtcatctaaaaaataccattttttacttcactggtactacttcagtctgcttagcctcatgataaataagggtggaaaaggagacaaaatgaattgtatattttagtaggtctaagtccatttccatttcattcagctcaatggcttccttaaagtgtcacaaagggcaaaagaaagcagagggctggtctcatgtcaagagtctaccttcccatcagcccctcagtgaatgaatcaatgctggtccctgatgtcagggttggaagcaaagggggctggcccccaaagactcataaggcttaatctagtgtcaatacccaagacactgatgtgaaagttgatcctctcatgaggctcaataatggcttttctacctaccaagcctggagaattaacctttgtagtcaaattcctagtgaagtattgtaaactctggattctgttatcttcctgttttagtaactctcccaggggccttaggtaccctggaccactttctgtcctggataaatgggtataattcctccatgaaacaccggattaacccttgaggatccttctggtttatattctgttattttgacacatttggctcctctctctgagtgaatcagcaaaagtcaatggaaccaaagaaaagcaaactagttgtcagtacagcaggctcatctcattgggcagatgtcatgagacttggcagtacatctctgtttgaaggttctcagatcccacccttagacagctggacaagctgtccacatcccagaatcctagaagtgttatatgattcactctgcctctcaataaaaaaatattgagtcatggctgtcctccccattcagaaagcattccagacctttccatctttctctgacccctgtgccgtactgctgttagcgttcatgactgaaccagtgagctcagaggcagagtgcaagtgtaatgatgatgtttccaggcactcaagtaaggagcctcacttgttctaggtctccatggacagtttacaagccaagttgagccattgaaaatatttccattctgtgccttctctgtaagatgaaatgtttcagtaatcttaaaggggaaaacattatctaagaccacctaaaatgtgtgtgaaagtgtatgggtttctcttactctctctgctctgcctgtgtgcctgtgtgttcattttctctctgtgtgtgcctttatgtctctccttctctctgtatctctgtgtgtgtctctctctgtcaatcttttcatctccctctcttcctccctctgtgtgtgactttctatctatgtgtgtttcttcctctttctgtatttctctggctctatcctctctctctctctctctctctctctctctctctctctctctctctctctctctctctctctctctctccctctctctctctccccatacatagaaatacatagggcactccatgtgaacaccatccttgaatgctatactggcacctcctatactggtttctagtaatgtcatctctctgtagctcagccaagagctctcttgctcccctgacacgtcccagagtaggtcctagtcggaggacctgctgacactttgtatcttgcggaagagattaaaacctcaggatgatcgtctgctgctctgtggcagaactggggtgggagcgtcctttggaactgttaccgtttgaatgtgaaatgttcttgtgggttcacgcacttgaatctttggccttgatagttttgttttgggaagttatttgtttggaaacctttgggacacagaatctaggtggtagacataagccactggggggcaagccttgggggttacaatctgacctctagtcccatttcctctggtccctgatccactgagatgtggggattctccaccacaaatgctggtcaccaggaactctgccaaccttgttttccctcccatgatggactgaaacaacgagccaaagaagcctctcctttaagtcatttattttagatattttgtcacagtgggggaaaaatagctaatactagagcttggacatgtgtgtggcagcatctttagagacatgtgtccctggcagcccatacaggataatgatctagataagtagttcccaaccttcctaatgctgagaccctttaacacagttcctcatggtgtggtgaccccaaccataacattattttgttgctactttcataactgtaattttgctactattatgaattgtaatataaattttttttgaatattggagtttgccaaaggggtcatgacccacagtttgagaatctctggtctatatcatcagtatagcaaagagtgatagcacaaacttaaaactacttgcagccatagcactaagaactttaaatgggtaactgctaaatattcaaaacattgttcatggtgttcccaagtacagataaaaaaccccctgaagctagaaattgagccagttgtatatggaactagcagagcatagattcaagcctaggtcattgacttcctaggcttctcagtctgctgggactatgctttacagtcaggtggggaacattaaaaattcttctgtctaacaagcccccatccctagtccagaaactgtctctaattaataacctctcacaaaggaaaattgttctctctagtggagcctcactgggtgtacaaactatacttaaggggaggcccacgtctagcaatagatggccaacacaaaattaactcagtggcagttttttgtttttgtttttttccagataggctttctctgtatagctctggatgtcttagaacaacaccctctgtagacaaggctggccttaaaatcacagagatctgcctgcctctgcctcctgaggactgaacttaaggtgtgtgccactagtgcccagcctaaaatctttctaaagacttattagtgtatgtatatgagtgttctatctccctgtatacatctgcatggcagaagagagcaccagattctgttatagatggttctgagccaccacgcaggtgctgggagttgaactcaggtcctttggaagagcaacaagtgctcttaaccactgagccatctctccagtcccacctccatctgtttctttgtattgtcctagtctggtttgttttatattattattattataatgagagaaagaaagggcgtggatttgggtggatgggaaggagttggggggaggggaaactgtaatcagaatattatatggaaaaatatattttcaattaaaaattattttgtctagacttttgcctagaccagtgaaattagcattaaagtccaccacgattcagagtgcatctggggtttaacactgctacaccgtgctcccttctcaggacccttgtagtctcctcccaaatggttcccattcatcagttggtctctttcccaatcatggcttacagctggctcataggaacatcctaactcaacactttcttctcccagttggggtcagactactcttgaccatttatggggctgtctgggaacaaattcttgaataatgaaatagcaacccacagctcctgctcacctacactatgccccctgagactgaaagaaaattacccacaatcccctgtgttatcatcatcctaataatttgcatgggcaggcattggtagcaggaacatggcctagcccagtggtccttgagtgtggtctgacaatccctggatatctctgagatgtttgcaggtgccacctgaaaaataaatgcctggttttctgtgtgtgtgatgcaggacttttgtgacaaactaacccaaagggcacctcacagcaaaggcaaagctgaaagccaaggtgtctttaattaggctagatattcaaacaatttgtaaaatgtaagataactctatttgtctaacttattttattttttatctcctttttggattttggaaattgtgtgtattttcatgaaactattactttatgagtttattattatttacaatgactaaagtaccagatttctctgttttaattaccaatatggtaaattgctaaatagaaccacaaggaaagctcctcggcagtttcacagttttttttttctttttatatttatttatttacttatgtgtttgtttttttgtgtgtatgtgtatggacacacatatgccacagcatgcatgtggaggtcaggggcaccttgtgagagtgggttcttttcgtcttccatgtgggtcctaaggctcgaagtctggtcatcaggcttagtggcaagcacctttacccactgagccatctcgttggtccctcagtagtttttaagtgtaaaggggcttagggaccttgaagtctgaacaacactggtttaaatcatccacaggttccgggaagcccactcttagctgcctggcgggaattggcagacaacctatggcctgatcgttgtatttactctaactatatatattttttaaattagttttagttttgggtgttttacattagagagactggtgattagctctaagatggaatgatattctaaggtcagattgcctcacttctgaaggtgcttgagaacgaggaaaccggttactttcctgataacccctaagatgttagacttcttttccccccccccccccaccccccggaagtcatgagtgcattgcaaaactctagctgagcagggactatgtcaagaagccaaagaagtgagtctgtcattggttcttcatgaaattctgtcctgtttaggcctcaacaccaacccagtccctattggtcctaaggatcatgacagagaagcctcctcccacccatccctgtgcttgctctgactttctttctctgagacctttcctctttgggcttgggccctctggcttctgtttgtcctggaaccctggcttttcctagcaggctgtgacaggctaccctggatcttggtctgtgtgctgcttttggcaggagtctttgtcccagctccagccccatgcacttggatgctggccacttggccaggccagccctggccccatgggatcctgtggaagagttgagcagagatgacaggatggagtggactgtttatagaagtccctctgtatagattggcatccaaagtgtgctgtcatctgcggggaccacagggatttcttcagagagcctgccagggagtgtgttgtctgccaagggactccagagcagctggaatcatggtttgtttatttcttgatactgtgaccattttttataaataagatctttttatttgaaaacttaattactacttttacagtcaagtgttgtgtaaaaggtaacaacaattactacttgctaccatttgttaagtcccttcagtatggcaggtgaggtgactcactcacttcacagttatttactggctccaacaatgagctagacaccaagggacagaaagtaaagcaggtatttgtggagcttatagtttaatacaggaggacacactgcatagtaaaacacatatacgtttatggtacatcaggcagtgacagactctgtgagtaaaaatcagacataaaaagttggagagaaagaagatgaaattgtctttatgatgccatgctcttatcgttgaaaatcatcataattgcacaaaaatatgttaggactagtaaattcagtaaagttgcaggtaagatcaatatgtctttctatgttaaaatgcacaatcaaaagaaaattgaaatttttaattataaaataagcatgaaatgacaaaatgctaagaaacacatttttctttcctttgttcttttttcttctttttttcttttttatttcttttttctttctttccttccttcctttcttccttttttttttttttcttttgagacaagcttcattgtgtagccctggttggcccagaactctctacatagaccaggttggctttgaactcatagagatctgcctccagagtactgggattaaaacatgcactatcatgcctggcttacaatgtaaaatttttgtacaccaagggcgatttctttctttctctctctttctccttccttccttccttccttccttcctttctttctttctttctttctttcttccttccttccttccctccctccccccctctctctttctttctttttctttctctctctcttttttctttctcttttcattctctttctttctttccttttcctttttcttttctttctttctttctttctttctttcttttttttctttttttttttttttgagacaggttttctctgtgtagccctggctatcctggaactcactctgtagaccaggctggccttgagctcagaaatccgtttgcctctgcctctcaagtgctgggattaaaggtgtgctccaccactgcccagcgaatgattttttttttttttgaatgtatccctccaaatgtctgtgttgaaagttaaggtccaccacagtcattttgagaggcggggcttctagtataggtgattagactttgaagactctgctcctgtattagtcagggctctctctagagggacagaactggtagaatggatgtctctgtatataagaggggttcatcagaatggcttacagggtgcgctccagctagtccaacaatggctgtctattaacgacaagtccaagaatccagtagttgctcagtccaccaggctcgatgtctcagctggtcttcattatgtgctgggatcctaaagtgcgctccagtgccagtgaaggaatggatgggcttgccagtgagagcaagcaggcaaagagcaaaagcttctttcttccatgtcctttgtataggctgccaccagaccaaccagaaggtgtggcccagatggaaggtgaatcgtcacacttcagatgatttaactgagaaaattccctcacaggtgtgcctagatgcttgggttcttgtcagttccaaatgcaaccaagactagccattatagcatccatcaaaagattaatgccattgtgtcagtattgggagaccagccctggcaggggtcaggtactgaggtgagaaacagcattggactgaggccaaaggctgatgatctctggccttgtgactctctcttactgttctgggggccacaagctgatggcctcaggaaacttaaccctctcttgctattctgtggctaaaagctgttagcagcagaattagagaaaaggcttggtttctctctggcccaagggcccctcccggccaggtgagaggctaggactttgttaactctttgtgagccagagagaaaaagaagaagaaagggagaattcaaacacacatgtggacacacacacagatacatacattttggctgggcccaactacctgtctaaataattccacaagtgtttatgaacacatatacatacacatatacctacacacatatgtatgcatatacatataggtagtcagacatatatacatgtgatggacggggctgagtcccaaatgccacactttattttttctctctagccttcttataccttctttataaaattaccccgtacatgaaatgttacacaaaaggggagttacagaaggatgttgatagtagacgcaaagctgtgcttcactctataaactcattataagttcaaagccacagtttcacatggtgctttgttttttaagatttatttttttactttatgtatgtaagtacactgtagctgtcttcagacacaccagaagagggcatcagctcccattacagatggttgtgggctaccatgtggttgctgggaattgaactcaggacttctggaagaacagttagtgattttaactgctgagccatctcttcagccccacagagactttttttgtttgttttaatcatagtgcatacctgtggctttattgttgaacctgacctagactgaatgtttttccttgatcacaaatttgtcccaagcctatttctctttttaatgtagtttatgaaagctcattatatttcttattgtccagcatttatttaatattttatgaggaggggacacattctattcttgattctaactgtattacatctttctggcaaaacaactaaaagtgtcttacactttcttcttaaaattatttgaatcaaatctggaatgtataaagtcattaactcatctaaatgccattaatctatgaaagttcatcttcatggtgatctgcaggaaatttgctcaatagggtgggctgatgcccaggaatcattaggctatgtaatagtggcaggagaggcatctcagcagcgagaagcaatcctgggatgaagtctctcaggaccctgtattctcagaactcacccattgtagccatgcaaaatggtggtccttctccagaaaactcacttgcttgctcatatagtctttcctagatggcttctgaaatctcaggagatgtaaacttctattctgtataaattacccagtctcaggtattttgtgatagcagcacagaatgaatactggcatcagagttgagagacagtccataggatgggagaaaatacttataaatcacatttcaaagatatccgtaaaatctaaagaattcttggaactcaactatacacagcttaattaacagatgacatgatcctatatgtagaaaacaacaacaacaatttgttttaaagtggtcaaaggacttcaaatgactcttatttaataaaaatatacagatgagctgtaaatacacagaataatgcctgatatcactgatcattagggaattgaagatcaaaccttcagtgagatacatagtcctttacaccctttaacatagttgcctataaaaaatgagatgattcccttaaggataggaaaatctgaatccttatgtgttgctgggatgagaatgtaaagtcatgtagtctctgttcaagacactatgatattactttaagaattaaacattcccttaaaaattaaatcacatgatacagaaatcacatttcttaatatatgccacaaagtggaattaaagttaggtatatatacatatacacaaatgtatctaaacatctatgtatgtatgtatgtatgtatgtatgtatgtatgtatgtatgtatgtatctatctatctatctatctatctatctatctatctatctatctatctatctacctatctatctatctccagaagaacagggctttctttgggacttctttatgccagggctgctgcttctgtaaggtacttcttaccagttaattcttccaggaagcacctccacagacctactctgaagcttgtttcttagctgattccagatccaagcaagctgacaaaatgtcacgtgatgtgacatttaccatcacatcacgttaacagtactgatgtgcactatagccaatatctgccagccaagatgagggatataatgcaaaaaaaaaaaaaaaaaaagaagtttttaagataagggaaatctgacacctgttacagggatgactcttgcaggtattatgacaaacgaaaataaggatatcacaaaggacaattagtgtgtgactttaggtgacatctgtgtagtaatcagattcaaggagacagagattagaacagtgcttattttgggctggggaaaaggaagatgaggagggttttgttttcttttgattggttttagatttatgtattatatatattgtgttctgcctacatgtatgcctgtaggtctgaagaggacaccagctctcattatagatggttgtgaaccaccgtgtggttgctgggaattgaactcaggacctctggaagggcagccagtgctcttaaccactgagccatctctccagccccagatgagtttttaactggctttgactttcactttgggaaggttaaaaagttctagagatgaatgctattgttggtttcagagcactgtgagtatactttatgccctagggctggattcctaagagttgttgaagtaataatttttatagatatgctcgcactaactaaattactaaaaatcaagcatgggaaagcatagaaggcagtatagaagaacagatatcacacacctcacagttatttgatctggagaaatgccccaagggtcagggagtgggtggatattgggataataaacacactccccaaatgtgttgacagagaacagggggttcgaggattgagtctggtggtttctggaaaaggatcagagaggagaccaggggggtaaatggagtgggtatcctgatggaggaacatagtgctcaggagggaggtatgttgtgagcagagagaaggaagacttgatgagccaaggatgaagtgttacgtgacaatgaagggccttagaaggagtttggttttcctcagagtagataaaatggggagcttctagaaggactgagtggatcagggcatgacctgatattttaccaggaactttcctagctgctgggcttgagactatattaggttaggggcaggactgaaaaggggaagcattgagtggatattgcattttcctgagagagagagagagagagagagagagagagagagagagagagagagagaactggtgctggccaggaccagactgactagtctgtgactgaattagagcttcttctgacattctattgagaaagtggtaggatctgctgatgggtagataggcacaaaggagagaagaatgaagactctttgagcttgccttgacgtcatcaggaggcagtcttcagttatgatcagaaatttgagatgtatagaaataggattggaaaatcatgaatacaggctgggaagctagatggagccccaaatgtgttgacaaagaacaggggggttcgaggactgagttctggaaaaggatcagggaggagaccagggggatgctgaccagagaaataggcaataagcagaagagagtcacaagtatttttcatagttatgcaatatgctgtacaaactatgcatggtggtgtgtgcaggaacccaaataagctcaggatcagaaaactgagccaggaggataaaaaattcaaagccattttgggctgctcaaaaccaaacaaaccaaaagaaacaaaccaactcctccccaggaatatcataaaataaatactattccctattttataggccatgggccatgggactagtgactagagaaaaagtttaacttacctcaagctaaatgctagaaagacaaaggcaaaattccaactattcctgctagattccacagcccaaatggggtaaagctccatcccacatagtgtttctgttgtgctgaggcagacacaaaagctgggagaacataactcagggctgcataactcaggagaagtaggtagcactctctgtcttccaagtgtccatgatctactgggccaatgcttatgtggaatagctaggtggggggggggggggagacaatgcaagatcaacccacctggtcaagccgggatggatgctggctataggaggctgcaaaagcttccactgtaactttatgtaggtgtatgaagatagaaagaagctattctaatgagggttcctgggcagaagccaccctgacttctggatgttggagcaagctattgtgtcttgggatcatcctaacatgagtatggataaccccatgatgtccttcctgccatgtggcaaaggaaggcttgaacccaggacccaaggccaaccatcagaatctgtcattgggaccgggaagcaggcaagggatgtcatccaagtgcagaaatcaggttgcaggtttatgctagccatgtgcagctgagtcatgacgtctatgccatatcaggctaaccacgataatgttaatttctggttcctgcactgggatcagctttttcttaacccatgtttcaagtctgcttcttcactttctactcatgctgtgaagtttagagaagtcaaacaattacagatagaaattatagaaaaattcataaaactcactggaagaaatgctgaaaaatccacatttttaaggtaagacacattcacttcagacaaattaaaataatacacacacagagagactcataataccatatataactaataatggacttatggatgccagggttgtcttttttaagtatacttcgtatatatttgtacattgcttttaaaatcatttttctgtcccatgttggagtcagatagatgagggtttatttatttatttatttatttattcttattgagaaacccaagtccttgggtgactttcttgcttctctgagcctgtttccttcactcacctcaaagggttcgtgagaggatcaaatgacattctttggatagtatgagcaatatcaagtgttgaatgtgcaatcgatgatgttatgatttaccatccagtttttaagtagcaattgttttaactttcaaaatgtcaagtgactttagcaatagttgtccaagggcaaaatagataagcaataattagtttctattaaggctgttgctagatgttgtactttgcacaaacaggaaaaaaaaaaccggctgggtcaagctgataagataaaattcattattacatgctgttagtattgactaattctgtgattattcattaactggaataatttccaaattggaagaatcttactttgtcagaatgctgtaataatgtcttcatgaaatgaaaatgatccttacatcaagccctgggaatgtcacttttctcagccctgtcctggctttttctggagcagtcaaagttcccaggaggacagaagtgcatggctaccatctttgggatcagtgtttccagcactctgttcagatactctgatcctggtaaccatcatgggacatgaaagctagatgtgaaggctgcactgagatggctagattttcttgagatggtaactggagccagttggaggaaggcgtgacatgagactgatgttcaaggtgttctggtgctatcattagtttacatatcaaacatatatggatgtacaaaggacctggaatggttaaaacaatcccaaaataaagcaagctggtgtgctctcactacatgacttcaaggctcaatggaagcttctaagaatacttggctctgatataggaaaagacacacgcttcaagggatcaggatagagagccctgatagaaatatacatcagctcatttactcttgatagtgttgccaaggcaactcaacaagaaaagaaaagttctgaaccttgttgatttttactgaggaaatgcatgtctttcagggacacctctgggtgtataagactttttttctctctccagaatttgtagcagaacaccacaacatagagatctgctacataaatgcctcaaaggaaagtattttaggacaaactgtcttccttctgtttgagactgaactttctaagcagatgtgtttgatggcatgggctacaagtttggatataataaaagtttgaatatattatccatacatttacaaatttactatttaaaaatcataaatttgtatgatgatataataagtttcatctgagtttcctttgaatgtatcaagtgtaaatgaaagtagctattgacatagcagagatattaaaaaagatacagaaaaacacattgattaatgattgaccccaatcaatatagacagtctagctagcgctgccaacttaatgagaggacaaatttgccaatgatgaatattaattcaacaattaggtaatcaaattaaagacaagatggagagaatttacatgtgtaaatgatgtcagaatatatgccagcaacatagtcaatcaaatcaagcccagtccaggttttataactttgatctgacttttgcaaatggaccagcccatattcaagttaactcagtgcatactcaagttaacaccagggaatgacaaactcctactgacgtttcccagcaggcctaataacaaacatagctgtctcctgtggagactggggaagggaagttaccataataaacaatttcaaatgctccaagatggatgaattcaacacatgtgcttgcagttagtttcaaacttgtgagtaaaaatggccacagttggatgttactagtaacaaaattatattcctgcatcaataaggtaagtggtcagaacgaagaagaaagaaaaaccattcacacttgatatttctaagtgatttactatctatcacctaacatctatttatcaatcatctgccatttatctatcttatctatcatctgtccatccatctatttaataattatttagagacaggtttttcctatgtagttctgactggtgtgaaacacctatgcagaccaggctgaccagctccttcctctgcctcctgtgtaccaggatttcatgtgcccaggagatttgtatacttttggtggtttagggttagaaaaagcagagcaagttgttgagggtaaagggatgtttgctcaggtgattatagactcaggaaagcgacgtggggtactttgacaggatgatgttgagtactttctggaggtacaaaataagatggaccaatgatgaagtttggggcaccagagtccttcataacgaaggacagagaggagtggtagtaagatgttcttgaaagggctcgggaagccctagtttcgacactcaccaggtgactctggttgtataagtcacttgatttccctgaacattttccatgttttatgtggggtcctggtggttctaaggattggtaaaacagaggacactgggcccttcgaaaatatctgccacagttgtttttcattatctgcttgtaactgactcttcagtgtaagcccaggctggagccacgcaatggtttctgcgagagcctggagatattttaggaaataatcaatacaagatgtgttgggttgaagccatgttgagaagcataaatcctgacagtatgttgtttgataaaattaataatgcttgagagaaacattgtaaaaacctgtgggagggaaaaatatggagtatgtctagggagagagttgaagccagtgtggaaagagtcatccaaagaaagttggtcatcatcctgctgctgccgaggcagtagacatacacaagcaaaccagtacaggagtgtgtgcatggaaacacaaagacatgtgcacatatctaaaggaacatgtacatatccacatacatgtccaggaacacatacacacatacatacatggaagtatatgtacaaaaaatacataagagaggtgtgtccacctggatatacaaatacatgtttgcaaagatagatgcacatacatgcatacatgagctacagattttgttggtggggtctcaaaggaaactggcctatgagaacaactagcatgaattccaataatgataattgcagtttgtccacttgtcttagttagggtttctattcctgcacaaacatcatgaccaagaagcagttggggaggaaagggtttattcggcttacacttccacactgttgttcatcaccaaggaagtcaggactggaactcaagcaggtcagaaagcaggagctgatgcagaggccatggaggaatgttccttactggcttgcttccactggcttgctcagcctgttctcttatagaacccaagactaccagtccagagatggccccgcccacaagggggcctcccagcttgatcactaattgagaaaatgccttacagctggatctcgtggaggcatttccccaactgaagctcctttctctgtgataactccagcctgtgttaagttgacacaaaactagccagtacaccacacaaggggctaccaccgtctcaggaaatgttggattttattaaaaactgtgtgtgtgtgtcatgttgggtgtctttctccactgtattttttgaaactggctccctcattgaacatggagctcagtaattttgctgtttaaggagcccctagcagcctcctgtctcacctttctagtgttagaattatagacacctgtcattgcacctggctttttacagggtccaaactcaggcctttgctcttgaagcaagcgctttgacccactgagctgtcctaagccctgctctggttttcctataattaaacaacggagagcggtaccctcattgagctttggaagttgttgatgctgtggacagggagaagatcagcaggcatgagagatcaggattctcatggctttaaaatcatccactcaaatccagaggtggcctgtgcttaaaaaaagaagaacatggcttttcctttgtctaaaatgtttccagattttctgaaggattttcttcacattagtgttgctgtgtgaacacttggagaagctaggcaggatgccttggaacataggcaggggaaacatagggaagccagggaagagcttggtaaagcctcaggggtaaagccactttccctaggctgacttgcaggcaggagcaattgaccttctgttggagaagaaaagatgtggtgggcttgtgaaacagaaggaaagaacccttgctgtccaccctgatgacctgacttagatccttaagacctacaccgatgctgtaggagagaactgactctttcaagttgtcctctgacccctacacatgtgctgtgttgtgcatagccctaaatgtttgtttgtttgtttgtttattttacaacccaatatcagcctcccctctactcccaggaccccctcatgcaagtcctcccccaattcctccttccccttctcagaaggtaccctctagtggcacccccctaactaaactcccaccccaccccggacatcaagtcactttaggactaggtgcatcctctcccactgaggccagacaaggcagtttatttaggggagcaggtcacaggcttagggacagcccctgctccagttgctgatggacccacatgaagaccaagctgctcatctgctgcttatatgcaggaaggcctaggtccagcctgtactcactctttggttggtggttcagtctcttggagcctccaagggtccaggttagttgactctgttggtcttcctgtagggtccctttcttcttccagtccctcagtccttcttccaactcttctgtaagactccccaatctccatctaatgtttggctgtgagtatctgcatctttttccactggctgttgggtagagtcttgcagaggacagtatgctaaattcctgtttgcaatcattaatagtgtcagagattggttcttgcccatgggatggatctcaatttaggttaatcactggttgggcaagttggcctttgacttagggtccctaaataagtttctttttttaatcttataaaagggaaaaagaatccttgaataccacacccagattagccagaggccatactggcacaagatgaaacatttactttccaaagagcggtgtgaatatttctcaacttaaaattgctttgtgttgctttattgtgaaagtattatgtatatcacatattatttaaaatgtaaatttcaaagatcagcagaccatgagtaaatcttcacattgggcctattttattttcaggaagaaaaaaggaagagcttcatcagccaaatccttatcctgggagaagtgctctgcatggtggatgtgtccatgtctataaaggtgagaggttctgaaagctcagcctagaggaactcccactcactgggtatgagaaggagtgggtgacatcaccatgagctcccagcatagtaattaaacaggtgtctgaaaagtggtccacagcatgactcatcccccacaccttctcctgtctccatcatcatctactctttgttgttcgtttggttttgaaacagagttttcctatgaccttggcaggccctgaactcctgcttctgtctcccaggtgctgggatcagtggtatactggtctgatactttttgcttgtttttgcatattgttttcaattatatacatattgtatattaattgttattctcacttgtctttcctttctttcttttctttctttctttctttctttcttgagacagggtttctctgtgtagccttggctgccctgggactctatttgtagatgaagctggtctcaaattcacagagagccacacacttctacttcccaaatgctaggattaaagagagtcacccatgtctacctcccaaatgctgggattaaagatgtggagcaccccaccacccagcttcatttgtcttgttttcataaagacagtaccataaatgtcagtaatttaatatcttcacttagatactactgctgagctggatctgtgttgctgcaatcattgccttcattaatttaagtaatttaaatatttgattttgaaatataaactctttaaattttatttatttatttattatgtatgtgtgtcacatagaggaaagcactacctgctctctcatcatcccacatgggagtcagatagtgttagctaccattgcatcacagtgacagaaatacccactggaaacaacagggagagatgatttatgttggttcatgatttcagctcattttgggtgagaaggcatggtgaagcaggtaggaccattgtggcaagagtgtgcagcagataattgacatcatagtagaccaggaagcaaagagcaagaagtgggcagaagatgtggcaagagaagtggcatctccaagatgttccttttggcataattctgtgtgtgtgtgtgtgtgtgtgtgtgtgcacttgcacatgtgtatatgtgcatatggaaatctgaggacaaccttggtgtcattcatcagctttattttttagtatttttaatggggaggggggaggagaggaaagagagggaggagaggagggagggaggaagggagagagagagagagagatattgaatgaatatgaaagtcccatggcatgcctgtggaagtcagaggacaatttgctggaatcagttctctccttctaccatgtaggttctagggcttgaactccatccaggtcttggcagcaatacccactgaaccaacgtgcttgctcctagataatctttaaaaattgagacagagtcttttactggcctgaaactcactgagtagactaaatcggctggccagtgtgtcccaggcatcctcctgcccgtgttcccagcactgagattacaaatgccatgtcatagcgcctgagtgttttcacataggttctggggatcaaattcaggtgttgcggttacaatgtaagcactttcccgactaagccctcttatcatcccattcaggagtctttcttaattgtctatcaggtagtggcttcaatgtaggattaaggtgaggacaaccagcacttggctccgataaccagaatcaccttctcatccccatgtgtcagttggggctctgccaaagctcatgatctgtctcttgataatgtcctgatatcagatgccagcctttaggcatctccagtggtggcctgtggaggctgtggtcagctctttttgggaacaatgtggttattgctccatactcctgatgttacagccatctcttttcttatctagatcatcaagaaaagagagagatacacctcaaacagtacatgttgttccaatgggcttccattcacatggcaactcagtcaaaggctaggcttttccccctaaccgtcaattcatcaacttgtttccagaatctgtacttgatctctccacctctttcttcacagtctaccatgttctgccatcaccactacctgcctgcctgactcaggctagaaaaatgtctgtgttcctcttaggaggcactgctgtaaacatgtctggccagaggtcactcgctcagatcctccctggtactcgtcctgtactcagtctggcttgatcgtgttgtctgccatttgtagaatgtggttttgtgagagaaagtccccacactttacttgattgtgtgagtggatgccacacagattttatgtataagctggtcgatttcctttgatggtacaggctcactctggccctagctgagtactaatgtagctaatgaataggagcttttcaagggtgggtaaacacacacagacacacagacacacagacacacacaccccaaaacaaaacaacaacaaaaaacaaccatttttccccccagggaagagggaaaagttaaaaacctagaaggaaatgtatcatataatgtatacattcaccattagccaaagaggaaaattcaacttgtcttagcttgagtattgtcttttaaactagacacagagaaaaaaatataccgttttgaattgattccatttcccaaatgtgtgggcacaggctggtcatacagtaaacagtgaccttccctctaaaaaaataaaataaaataaggtcgagtttaaacttgatagagcaaaacaggcttaactgacacacctaaagaactcatcaggccagtgagacatgacttctcgaatctcttggctgtcttctttcctcagccctatcaccagctcatggaaagatggcagtcagctggctcggggctccatcactctggatttcattgtgtctcagtggccacttgggatggccccattgaaaccctcagtctaattctgaagcttcatggatgatgtagctcagctagatgtatgtcacagactcatcctgaagccacctgtaagccattcaggctcattcttgggagggagggtcttcaggggaaactcagagagaaaaggaatgctgagttcaaggccagcaaatcccgacatgcttccacccacacctttgtctttgatgtcagctggcttgctccttccgtgtggccttgttctcagtgcctcttcttcctctttgtattggccagttattgtcaacttgacataaactagagtcacctgggaagagggaacctcaactaaagaactgcctctctatccaactggcttatgtggcaggccttgattaatgttggacatgggaaaacccagccccattgtggtggtttcaccctgggcaggtggtcctggggtaggcaagagcaagaggaacaaaccatgggatcaagccagttggtgacttcttcaatggtctccacttcagttcctgtctccaggttcctgccttaagcttcctgccttggcttccctccatgatggctgcaaccttgaagctggaagaaaccctttactccctgtaacttgcttttgatccttatgtctattgtagcagcagagatcaaactagagcacctctcctcttcctcctccttaagcccatgcttgctccttcccctcctccctcccattttttttttcctgtcagcaacactttatcagggcttgtaaagggacataaaaagacccgtgtagcactgaaggatgctaagagataccccttgaatggagtttcccagtgggtctagttgttgttaagctgttgattgtggctagtcattgtctgtactgtctttgtttctagtgtggaatcctttttttgttatttggtggtgcaatcagcaatcttggaagtcctgaacacgttaccaagtggttttggccactcaaggtatgatgcttgccttaatagactgcttttttcacaatgacttttaaaaaaattcatagtacttttatgtgaatgtatatttgaataaaaaaaccagaattaaaatctgtaaaaaatttgtcccaaatgagaacttcaagactatcttttaaaatattttgctatatttggcatagtcttctttttaaaagactaatatatatatatatatatatatatatatatatatatatatatatatatatatatatatatatatatggctggagagatggcttagcagttaagagcactagctgtttttccaaaggacctgggttcaattcccagcaaccacatggcaccttacaactgtctgtaactccagtttcaggtgatctggcacacattcaggtaaaacaccagtgcacataaaatagaaataaatacattttaaaaattatatttagggttgacattttacttgaatgtttgtctgtacaccacatgagtgcctggtgccttcagagatcagaagagggtgttgggtcctctggaactagagttatgggtagttgtgagtcactaggtgggtgctgggaactgaacataggtcctctgcaaaagcaacaagtactctataccactgagctatctttctagcctcatctgtcatatttctgagcttataaccaactacatttatgatttttaaattttatgattgtctccagctttattccccttttcttgctactatatagttaatggcccaaggtcttcagttaaaggtcatctgaacagctaactctcttttaatatctcatgaccttcaggagcagaagtatactgggatgtttgcaatgactgagaggggccatgggagcaacgtgagagggatccagactgaggccacctttgacctcgacaatcaggtgaggaatcggtttcctgtttcctggttcagtgcatcaggggaccagtacagaccatcgcaactttcctgagcctggcttcacatcctgtgtgtgtgctctggtgagaagcagaggctcagaacagcatatgactattttagaggtgggaatgagctccggctttggacagcaatagcagccaacatttaaacacttcctgccaccaacaggacactacctcccactctgtacatgtaccctgtagtttccacctgtaacctttcctagctatgttgttctttccaacagtagtgtatgaagaagggaagagatatctttgctctttctgtctgttgcacatggcaggatacccagagctgaggcttcctggttaggaaagtcctctatgctgacacagttgtccctcaatattcatggggtactatagcttctaggaccctctgagaattctaaaattacacagaagctcaatttccttatataagtagcagagtgtttgtgtaagacctaccacatcctcctgcatactttatatcatttttgatgccttctatcatctaatatggtacaggtgtcgtatacctgttgaactgtatcatttagggaacaaggataagagaacaatgtctgctgattgtcagtatagttgtaattaatatgtatatcaatgcatagttggttgaatccaatgaggtgggattcatggagatagatggccagttacttgtgttatgcaatgttctttgtgtgtgtttgtatgagtgtgtggtgtatgtgcacatgtgtgcacacgtgcccgtgtatatggaggctagaagaagacatagagtgccttgcttgatcattctccatcacacgatggagacagggtctgtcactgaatctggaaggaattaggctagcagtcagatcctcctgtctcttccccctcacagtatggggttacaggcatgtagggtcacacctggctttttacctgggtcttggggacttaaactcaggtcctcacgtgagcagcaggtattcttccccactgagccatctcccagcccctacgtggtgttcttaaccatgacttgcatggttttatgtgacagcctgaaggcagcacactgtccttgttctccttttacttcatgtgatgaactctgacctttttcttttcattttgtctttgtgcttctatttttgccattattcctttctcttttctttagaatgctaatctatctatctatctatctatctatctatctatctatctatctatcgatcttctatctatctatctatctatctatcatctatcttctatccatctatctatcttctatcatctatctatctatctatctatctatctatctatctatctatcttctatcatctatctatctatctatctatctatctatctatctatctatctatcatctatctatctatatccatgtatgcatgtatgtatgtatgtatgtatctatctatctatctatctatctatctatctatctatctatctagtgtgtgtgcatgtgtcacagcatttatgtggaggtcagaggacaacttattggagccagttctctccttctaccacatgggtccttgaactcaggttatcaggcttggtggcaaatacttttttatgctgagccatcttgatggccctcttttcccttcttaataattaaataaacattttggtcaagaccttctaaccctgatgtcttgcttcataatagaccacaccaaagcatgtggaagctctttgaagctctctactactggaatcttcccctgaataaagaaagccactgtggtttgtcttactttgtggtttcctacttggtactgggtattcctaaggactctaaaggagtcagtaaattctaatgtgtagccatgtttgtgagctgggtgggctggggacattacacaggtgtctgtctagttctagtcttccatttcctctgagtttgccttttgggatcaggactttttttaaagcaagttttcttgactgatacattctcattggatgagtagccagtgtttaggatagcatgttcatcagttaagcagttcccgctagttgagaattcgagtggtagacaggcactaaattaagtactgagataaccagccaacgaactactgttgtccctatttcacaaacaggaaaactgaggctcacagaggttaggagcctaactgtattgagagttaatgagggatcttaggctgaaatggaactgcctttaagagtatggctttcccaccaagagatggcttattgacctggtatcttgtgagttttggctggccttttttttttttttttcttttcccaagctgtgatattgagatgaccttggaatcattactgtgagggaaaaaccacccacgactcttgtttcttcttacaatttttcctcaacaaaatataatttctcgcctggtcccattttccccaaacagcataagtgatttggtcactccatgggcctctgcagctgcccctttccgacaggggaactgtgggtaagaagtatggtgagcactgtgtctccagtgggtgggagagagagcaagtcagttataagcttttgcctggagggagtgtgtgtgtgtgtgtgtgtgtgtgtgtgtgtgtggctttccccttggattcatggttctccttcatttcctcttgaaagcaatgcagcatatcaaatgattctccctcccctcccttattttttttttgttttttgtttcttttcttttcatttgtaggggaaatagattaatcagttgtatggttaggtgtgaggtaagagagagttttatttttaaactttatgctaactagtacaaataaatgagattttagccaaaggtttttatgtttttttattagtttacatttattgattgattgattattgattgtgtgggtgtacaggcacatacaaacacatgcatgtacttccgcacttccgcacttatgtggtcagaggacaatttgccagactctgttctctcctttcatgtgcagtccaggaattgaaaccagatcattaggctttgaaacaagtgccttacttaaaaaggcttacctttttattttgcattatgtacctgtgtgcaggtatgtgtgcaatgtgagtgtaggtatcctcagagcccagggatggtggctgcctagagttggagttacaggagtctggcagcttcctgacatgggtactgagaagcgaactcaggtccttgtaaatgcacagtatgttctgaaccactgagctggctcttcagccctctactttcttaattttaaaaattaattaattaattaaccaattaattaattttaaacacttcttagtgtttgcaactctgaccattttgctggtcttcaagtaatcataattgtaaccagcacacatgctgggcattgtttagattacagttttgactccagtattttgtctgatacaaactttccatatcaagcatcttgccagaagtgacaaacctcttccccggggtgtgtcagatgtgtacaggacaggtagcctcctgccctctccccggcagccctggggtgtttccagggctccttccctcctcccccctcacacacacaggttttttggttcttctagctcactgcatgcagcctagggttgctcccactttcagaagccctggctggccagataagctaagggcattctcgagagacttctcttaaaatgattcaactcgtctatgtattctgaaaagcctctgcacatgttaaaggttttcctgtacaaacttgtgtcagagattgttttcttgggcctcaagactgtatttcttggcccaacgggaaagcacagtctataaactttataatctgaaatcagagataatccttgtgtgaccaagagcatgttggtttagctgaatcttatcttctacattgtcaacttcaattaaatggctagtttctctttctgccatttcctctgggcccctgatctatcataggtaccctgtattcagaactgacgatgaggtcagtgccttcttcagaagaggtttatgggtaacccatgtggtgagcaagactggggaaaaccaagcctcgaaggcagtatttccactgggatgctggtattggtttccagacagtaggaaagggaagcctaggtttgagcagagactggaaacaaaccccactgctgttcctgtttcttcagaccaggcttggtttcagggtgtttggagctggaatctttggctatgttacggagacaaactgcacagggattgctaagaatccctcagaagacagactccttttcaagtgtttctgttccaaggacttgagcacatgactcttgcctgggacattgggggactttattagattcactgagtagcaaaatattcatagcaggttctgagacagctagtcaaaggctttgatggctgttttcttttcctttagaaataaaaattaaaattattttggggtgatatactaaggaatgataggaatagctcacaggagcctgctttgcttgcagccaagcacatggctttagcttctgatgagttggttgccagagttcttatcatagcttcaggctggccaggcctgtgcaatagtggaaggcatgggaactcagatttatccagaagcataaaacaaaatgaaacatttgtacactctggatcaaaccatccagggccctggatcattgggctgttccctcttcttatgggcacctcataggtgacgggtttgatgataaggagtgtgtggagagctaagtgtattctaccactgcctctgtgtgtgcatgtgtgtgtgtgctcatgagagatagagatagttagagaagagacagaggcagagaggtagagacagagaggggttaaacccattgccttaagccaagatagtattctaccactgagctataaccccatccctttatttttattttgagaaaaggccctttgctaagttgcttaggctgcccttaaacttaccttgaatttatagttttcttgcgtcagcctaccaagtagctggggttggggcctttgccatcacatctaggtcttataagggttttgatgttggattttttaaaagtggaaacctcagtatgatgtagttggatgagaaaaattgataattgaaaaaaataatacattgaaacctggcagatgaataagacagtacacatcagcctgatactatcaaagagagactgggatttattgagtgaatgactgaatgaaaactgggtacttcttttcctgattgaattatgcacaacttcctgccccccagctctttaatttctactctcctgcaaagcaaaggtggaggtgaaatacactagtgacagagcagtacaaaattaagacaatgactccccaggagcctccacatctcttcaccatgcacatcccttttatggtattcattgtgttgagttaggggttgtaaggagtcacatggaggcagacactctgtggcttactcttctctgcaggagtttgtgattgacatgccgtgtgagaacgcccacaagatgtacatcggcaatgccatgcatgggaactacgctgctgtcttcgcccaactcatcattgagggaaagtctcaaggtttgccaccaacatgaaagccttgaagaattctctttgctattgctgtttccccatcagttctgtacagaaaacatactccacagggccagttttatcttgtaaaattacatactactaactttatcttctttataaaagtgatggaatttgttattgcctgttgacattagtcactattgggtgcagtgcttaggactcaatggatttggagagtaaaataatgttatattgctccagagaaagcatgaggttttagtcttttattttttttaaaggtttatttattattgtatctaagtacactgtagctgtcctcagatgcaccagaagagggcatcagatctcattacagatggttgtgagccaccatgtggttgctgggatttgaactcaggaccttcagaagagcagtcagtgctcttaaccgctgagccatctctccagcccttattcttttatttttacttatttatttatgttgagacaggacctcattgtgtgacccttgcaatactagaactctcaatgtagaccaggctgtccttaaacttataaagatccacctgcttctgcctcccaaatgtggggattaaagacacatgccaccatacccagctagaaggtttatttatttatttctattttttttgtttgtttgtttttcgagacagggtttctctgcatagccctggctgtcctggaacttactctgtagaccaggctggcctcgaactcagaaatctgcctgcctctgcctcccaagtgctgggattaaaggcgtgcaccaccacgcccggcttcaaaggtttattctttacaaggtcgagtctagggccagctatatagcttactccaataattccaacacttggaaggtagaggcaggagggtcaacttgaattagaggccaccttggcttatgtgatgagctctaggccatctagggttacatagtgagactctgtctcaacaacagtgaaaatcggtgagcctaataagggtctgtctgtttgtcttccttagggccccactgttttattgtccctatcagggatgaaaatggaaacttgtacccaggagtgacagctattgacatgatgcacaaagagggtgagtcgtcaagtgaccctcctctgtgtttatttgtacctgttgtctgttctcgaaggagaatataatccccttcatcttcaggaaagcatactggggggggggtctttccagggagtatacattgaagttatctcctctacaaaggacacagcttcaacttctctcttcttggacttagggcaggctgtagctctctggtgcctcttcacctccagactaatgtttgtaactgacccaggagatttgtaatataagtgggtcctcacagttttggaggatagaggtccgagatgatggagctgccaggagatgttaattccttctgatgggggcaatggaaggttctagtccaagactcttacctccacttatgaatgctacctgcacatgagcatgtagtctccctgtgtacacatctgcctccaggtttctccttcttataaggattgccatcatttataacagagtccaccttaatgatctcattttaacttggttgcctctgtaacgcctctatttctaaacaaggtcatatgacagatatgggcttaggacttcaatctatgaatgggataggggaggtacatctcatagcactcagtgagaccagctttccaaggcgaagccagctaaagaaagtattgtaggagttaaggataaaagagagaagaaagagaggaaggggtaggggagacgcactggacagtatgggaatagcctcagcccactgttagtacaggcaaccttgcttctgagtgtggcccctgtcaagtgcggtgagagcagagggacaggccagtgcttttgaagtcacaccacatgttgacaatactgacaactgcagaaagtctgctttggaattctcatgtcttctgtctttaaatttcactagtatcccgtgtctgaggaggaagtccagaaggggaggaagcaggagctgtgtgtgggcagaggctgacttccatcttcagtgttccatgctttctcttacctggcgcactgccttttaactcctatttacttatttagttttacactttagcttatgtgtatgagtgtttggcctgaatgtatgtccatgcacggcatgtgtgcacggtgctcagggaggtcagaaggaagtcttctggaactggaattactgatggttgtgagccactatgtgggttcttcagagctgaacccggctcttctgcaagagcaacaagtgctcttaacctctgagatgtttccccagttagtctgaactctctccttttaatgaggtttgttgctggggaggaaaatgtaccccaacagaaacctgagtccctagcacactgtgggctccaaacaaggaaaaccttgtcattgtttttcattctccttcagggtgggggttagggatgggccaggtgtgtctgagccagcccccaccccctccccacagcaaactgacagcatccttactctgccccctccagttctggaaatgtttaaggtttatgtttttggccaagaagtagctgaggccgtctgtaggatggtgcatgcatagctttcccttgaatctattttaattctgttccctccaggtatgaatggtgtggataacggaattttgatatttgacaaggttcggattcccagagagaacctgctggataagtgagtactcttctccttagtgtctgtacagatgacctacttgttcccgcaaatgaggccctgagttttgaggtctcactgtctgcaagattgagcagtcatcttctgagtgtttcaacaactggaaaaggtagataagccgctagagagaaggttaaatgctccaacatgacattggtcatatgtaatgattgatacaatttaatgggcattcctagacttttctctatgccaatatatctaaaaagggagacttacattagaattttaacagaatatccattgatagatcttgttcttctcagaacttctaatttccatctgacattgaatatcagatgtaccaaagtaccatgttaactagtctgtaaattatgtacccaatctcttgtttttggatatttatcttccttagattttggcaagaataaacaaactgatgtgtgctacttgcttcccttgtgggtgtgaaaagttatgattaccaccttttaagtgtaatcaaaacacaccgtatgcatgcatgaaattctcaatgaataaataaaaaatattctattaaaaaaatcactgagggggaaaatgcccaggcagtcacagggcagtcaaggtgcatcaatgaggtgagaggttctttctctggtaagatccacaatggcagtcagggttaaagacgcctttcctatattctccgcaacagcacttacctcagtgcctcagctatgtttcctgtgtgtgagctgtaaaccctgggccacagctgtgcttacatcactggtcgagccggaagtctgggcgtcaataaactgcctttttggcttgctgtggattttctcttttacataactttgctacttacaagttcatgtccacaaataaatgtagttgattacaaaagtcaaagaaatctgtgtgggaaacaaacttaaaatggacaaaattccctctgtccccaccccatgaactgttggtaaatagaatagaaacgctgaagacagacgtcctggaaagtctctgcagccaccagtgcttgtgaaagtcagttcgaggcccatagaggcccagttctagccttccctaaaggtctatttcctagcacttggtagcatcacctgatctggaggatggaagaggaaaggggagacaggatgggtgactccccatatcccatcaccctattcagagcttagtgggtgattcagcctcagatgacaactggctaaggctaagggctcaccaaatgcagtagaggtcaaaaagtcagattcaagtagaaagaagaaagctggtgggcttgtattgtttgtaggtaatacatcactttgacaagcaagattttatttataacattattttattaccatttaagttgtcccccacactgcagaacaacagtggccatatggttttttaaaaaaaaaaacatttatttgtttactttatgtatatgagtacactgtagctgtacagatggttgtgaaccttcatgtgattgttgggaattgaatttaggacctctgttttctctggtcagccccactcaccccagtcagccagtcagccttactttctcagtccctgacttgctccagcccaaaggtttatttattattataagtaagtacactgtagctatcttcagatgcaccagaagagggcgtcagacctcattacaggtggttgtgagccatcatgtagttgctgggatttgaactcaggacctttggaagagcagtcagtgctcttacccactgagccatctcgccagcccccatatggggttttgaaagagcagtcttttgggggtcttggttcatcggtgattagaaagtgaactagttaataggtataaatataaataattcagtaagtctctaaaaatgtcagctgccattttattttttgaagaaattaataaactcatcctaaaattaatagggaaatctgaataaaagcaagccatcttgataaagaagaacagagtgggaggatcacacttggaatctgaaagcttgtgacaaaactgtgttagtctacattgtatggcattaggatcagggtagttatatggataatggagattagtctacagataaatcctcatgtttattgataatcactagacctctggagcaccaagacaaagaggaaacaaaagtcttttcagcaaatggctggacccttatctcatactacccaactacagttagaagacaactggggtatatacttagtgaccttggtctcatcagtgagttattaaatatgacactaaaagtacagccaactgaagaaaaagtaggtcaattggagtttataaaaaaatttttaaaaagtgacaatcttctgaattgaagaaaaacttataaatcaaatacatcataagggcctagcatccagaatgggaaactatcccagctaatcaagatagacaaacagttaataaacaaaatatgaatagacatttcccaaagaatatattcaaatcactaataaagaagaaaagaaattgcaacaataccgctgtcattgggagactattgtcaagtcacaggaagatattactctgcacttcttgggatggctagggcaaaccatagagacaatactaaatgctgctgtaggtgcagagaggttagaaccatctcacattactggcagtattataaaatatctgcatagatttggaaagtcacttagaagttccttagaagttttaagttcagactggatagatggctcagcagttgagaacgcttgtctgctgcccagattcagttcccagcacccacataatggctcataactgtctgtaactccagttccagagatctaatgcccttttctggcctcactgagctcctgtactcaagtagtgtgcataaactcatgccagcatatatatacaaataatacataaatcttaaaaaaaaagtttgaagttaaatgacccaacagttttatttcaaaatgtgtatgtgtgtgtatacacacacatatatgattgtgtgtgtgtatgtgtgaacatatatacatacatatatacatatgcatagtatacacacacgcacacacatgcacacacacatgtgaacattgtccatatgctcattgaaatgtgtacttctatttgtttcaaataaacttaagcacaaatgttcatagcatagtcattcataatatcctcaaagtagaaacaactctaacatctgttagctgataagtgctaaaagacatctggtatgtccattgagtaaaacattcattcataaaaaaaaaaagaaatactgctctaggctagagtgtaggtgagtaaaccttgcactgagtaaaccttgtgctgcgtaaaagaagccagactcagagaaatattatatcatttgatcccactgatgcaaagagcaggatgatccataaagacagaaagtcagttcccaaggactagggggtggaggatctagacagtaactctaatggtgtggggtttctcttagcatgatgaaacttgaggagttgaggaaaaataaaggttctagaacttgtgaatattcccaaacccaccaaacccaaatgctgtaaacatgtgaattttgtgggatgtgagttgcatctcactgttctttaaaaagcaagcaaacaaacatgtgtttgcacattcaggccctggctttggtttgatggtgatggtctttctgctcttcctttttgggagctgctacttcactgtagactggcagcagtagagaacctgttcttgtcaaatccttcccagcatttcttgcaaagctttcaggatgctcattgctgtgttcactcaagagtcataagatatcacatctagtagtgccatgcttgtgttgtgttaaatcccatcgccttttttcatcctgcttccgtacatcctcacaggtttggttctgtgactccagatggacaataccattcacctattcaaagcaagaacgcaagattcaatgcgatcctggcaacactgactccttcaagactagcagtgactttccaagctttgggcgccatgaaggtagttggcactgactttaattaacttcactgtcagttgtttccagaatgagcaacaatgtcagatgctaagattctcaagccacagtcaaaataatgggaccagagatattcgttatatgctgaagagggccagttaacaatgaatatagaacatttctgcatccttgagactatattccatccatctgcatctcagatgtgtgttgctaggcacagttgaaaaagtagcagaattgtaaaagatggcccacagagactgtcttatttaagacctgtacagtatgggatgacagctccaggaggggagagcaatgtgtgattttttcatgttttcattttctgttctattgaacattattttggggatagcactgattacccagtggatctagagagtcacagttccttctgggtggtctgatagtctggcatgcattctttgttcctatcaatgtagctatgtgaagatgagtgtgggctttgaattcagaggtgctgtattccagtcttatctcgtgtgtccagtagtgggactgtagggaagtcatcagtcctctctgagccttaattttctcatcaataaaatggaactgatggtggtggtgaggtaagaggaaggaccaagagtgccaagttcctggtgcagaatagcagctctgtagttcagagctgtcagtaatgtggttcttagagcagcagctctgtagttcagagctgtcagtaaaatggttcttaccgatgctcctgctgttactggcaggacagaagctgactgtaacaaggaatgattggttgtttccatgcctagagaacttgtttccaagtagggcaatctgaaatgccttgggctcttggttatctagagggctcttggttatctagaataaacaacaaactagaatcgtccaccggtctgcccatctagaccttgccagccaatgatattatcccgagtgctagtcaactttctgttcctgtctggagggttctgagacaattgacttataaaaaggaaaaggttatggagtttcagcccacgctcaggcattccactgtcgtagagcattgtgggtccagggaatgcacaagaatgcttcttgtgtcatggcgtctgggaagcaaagagacaggaagggtctgtaccagtcacttgtctcttgctacgacaaaatacctgataagaagcagattgagggaaggaagggtttcttttggacctacatttccatcgtatatggtttagtatggggggtgggggcggggaaggggatggcggcaggaacaggagatagctgccacactgtgtctgcagtcaagaggcagagagtggcagaggcttgtgctcagctccagcttactctcccatttttatccagtctagaacctccactgggatattattcacatgtagagtagggttccccacctcagttaccctaatctagataaccccttgcagatatgcctagagtattatttatgtggagattctcaatcccaccaagtcagcagtcaagactaaccatctctggggctgagctcgctgtagtgttgagggcacatccagagcgatcttgcttccttctgtcctccctagattctaaagactccacagctttccatcagtgccacaggctagataccaaactgtcaacacatggtttggggaccagcattcaaggtcccagctgtagtgttcaggccaagggggattcttcacagagcctagatgggggctctgtgtatactgccttgttgcccattgaatgacatttccagtggatacgttgcatagtgagtgtccccagcacagatgtttcagagatgccctctcgccagccacttcccctgcagctcagatgagggacgggtgtttcctcggctgaaacctaagatgtttctgatccttctgctgtcgctgatgaatggaaaacggatccttccctcctgcgtgtattcttgatggattatgaaactgtcacccaggctgctcacaatgatattaactcaaggctgggcatgcccagtccttttaaactttgcccagatgtctgacttttcatgactatctctcatttccacaacattcctcagtacattgagattgctctcaaaggcttgccgcaacagccatcctctccttcgtgcccaaagtgccgtgctcaattaaatgatcaagaagaacaggaggaaaaagaaaccaagatatttggggtggggagtcagagagggaggaggcttaaaggaccttcaaagcctacttggagggggtagtggtagctgggaagcctttcccagcaaggaagggagatgaggataaccctgagggtggagtgcagaagcagaggacatggggaaataaacaagagccaacctatacggttggattgattctgtgtgagggaaatgttttgtcacaagacatgttgtctttactcgtaaaggcatctctccccaaaggaggcttgggagctgcaccccatcccagcagtgtctgtctggggtaagtgatgctacaggcaggggattgctcattgagaatgcctgtatacacaggaatacttgtcccagccaccctgtcccccctgtgacctaccagtgctcaagaaccaagttctcatctcatgtgaagggtcttatatgacccctcttcctgatccccttcttcccatttgctcatgtctcccaatgatgcgccttgcatttccttactgtgggtgtggtactcacaagtgatgttctgtctacaattcccatcttatctttacgtccgattcattttcacactcatttctaagcacttgaaattgagccttctttggaaatgccaggcttgcacacgaccctagtgttgtctgtctctaagacatggcagacctcttgtagtgtccttttggttataactgagaaaatgttgcaagagtgaccctggaacttaggagttccacatacatttcgggaatgggtcacaattccattcagaagaggacatggccaatcccaatgagattgactgggtttgggcactgtatgtgcagagaggcaactcaaaggaaatggggctcataggggttggacccacatttgccaagactggtatctaccagatatctccatgtgtctgcacacaggggaaagatcacttgaggacaaagtgggaatggcttcggggaaccgctggcacctcaatctgatgcttctaaactccagacctcgaggggaaaatatctgctattgaagttatttggtctgtttcactacctcaggagactgatatacatgccaaaaaacccaatgggtccccctccacaggctgtctgtcagtcaaggctgcagctgatgggagtcatcctttccttaccccaggacccagccctgaactaggcaaagagaggcacctaacgtgaggttgtcaggtgagattactgagtggaatcaacatgaacggaaacagctggaatgctgtgtctgctccagatgctgtagcgaggccattatgaatgagcagggctctggatccggcttttctgggctttcattctgtccacctagcctcaggattcagagtcagtccatttctaaaccaaaccaaaccaaaccaaaccaaaccaaaccaaaccaaaccaaaccaaaccaaacaagacagaactgctgtaagacacagcacatatataaggagtttgcacatatatagggcttgcataagtacctatgtataccaaaaccacatacatacatgacagggatgtggaagctcacaagaccaagttcaactacactggttattaaatgcacctgaggttgcaagggtgacaaatagggacagtaacacaagctcacctttggcgtggatgctcagacccactgtgagtggtgggaggactttgtgaatgagcagtgctggctgtgagggggctgcagacaacagcagccatgctgcctgagctagtgatggagcggtcccttgggtcttgctctagcatagattttaccgttagtgacagaatatttactgggagcagggactatgcctttttggttcagtctcagtgcaaggcttaattaagtgctaaacaccatggaagatttttagcctcccccggtcttctttctgtccttccatttacccttctgtctacctagccactcatcaatcatctaccagtccagaacctacccacatacatatccatctgcccatataccttccacctatcaatttttacattattctatcttttcagtcatttgccaatatacaaatacagccctccatgcatacccatttgcccattcatccatcctttcctctctcctcccctccccttgctctgtctctccattctgccctccaccatactgtaggctttagtgattaatggagatctgtgcaacactgtggagaaaacaacccatctctctggatcacattagaaccatgccgtagctgggagtacgggaggagcctggaggtagtagcacctcagtgagatcttgcaggaaggctcagggtgggagctgtactgaatgggcatggctagagttgaaagcctttgctaatgttcatgtaacttggcctaatagagggcagagctaagagaggtagtgggttcctatgtcagtgtcctaaacatgcatggtgtgtgttttgctaaaactagagagaaattcaacagatgcatactcttttaacacgtgtcaagtgagctcaccattcatctgttctcagagagcagcgtgggagagttgaaattcgtggctcatctctcattagttgtctttttagagaaagcacggtctcagtgaacattaagctgcttgggctgtattattccttttccgagagagagagagagagagagagagagagagagagagagagagaagagaatggtagggggagagggagaagagagcagaataccaggacttgctctgtgggtgagaattctggtgggatgatggttttagtgtagatggtcctgggatgggagattggggtaagggtacatctgtgtcaactatggcgtggaaccttcccaggaccaaccaccagagggcagcaaagaccaatttgcggattgtttcctgactgcttatttgctttgctttgggtgtcagaagtggctggaattttgccgttgtcagcggtttattcggcttcttatcaaccacaagtgctgactttaaaagggcaatggtcactgtgagagtgggggagcctcagctgtgtgattgctgggctcaagatcaagcttgtaaataagctatggttattttgatgactccagggcataatttgactcataaatgtctcctaaaatcaaatgaacccaacaaaaccaaagcccgttgtatcactttggatgggtataaaaatgcttacacattgtcgtgttgactctatggcaattgcttatgtttttacaacagaaacgtaaacatttatctttattttgagtcagggtcttgcaatgtatctctgcctggctttgaactccccttatagaccaggttggcctctaactcagagagatatccctgcctcttcaggccagttactgggattaaagacatatataccgcaatatttatcttttaaaagattaatctgccgcactttcctccaaagtgaggagccagagctcagtacagctagagataagcttgtgtgttgaaagtgtgtggaagaactaccgttttgagcgcagttccttttatatgggcccaatttgttccctttcagcactgcgatgatgatagagatgacctggtgcataccccacagagactcagagtgtaccaaagaaactagaccattgaaagggagcatccagggttaccctggcaaggggacaggggcaggtggtggtcgggatccagggctagcaccttatagaaggaaagccctagggtattgtgggttggaagggacctcggagattgtgttctatactaagccccactgctctccatggttgggattgaatctaagaattcctacatgaagaatacaaactcggtcgctcagctgcgccccaccccctcttttatagaaatatttccgagtaaggcctcttgatccctggcagagtgacctagagttggcatgcagcccatctttcttgagtcacacagctaggtcgtgcttacagatagatggacactctcagcgcctgtggtaggagtggagtttttcagtgctgaaggagagggaagtccttgggcgttcctccctgtttgatgtggcatagggaactttagctgctgtgactgtgccagcagttcaaggatcagcactgcttgtcagtgagtcatcagaggccaaacaggcctctgggaacccagccttctgaggctccaggtacagccacggcagccatggggactgggacacatggctgtggactgtttttcagatgttccttgcttgggtcctgctaggaaggaagctggccttcctcagctctgtggcccacttacttgggacagagggtatctgggctacagctgtagggagctgcattgtttcatggagactgtcacctgtcactgggaatcatcgtctgtgccacctggaaggttggacaatgacaaccgatggctggcaggttttcctcagtgtttctgcctgaagccatttccatgtaagatggtccctgtgaaggggactgtcccttttcttcacatttcactctgtcatgtttctgtcccttgctttagtagattcacagagaaagggattgaaagagaaaagccacaactgtggctggcttttgttgagagcttcctgttaagggacagcatttgaagcatgctatgagcaatcacagttcatctcggcagtcctgtaaggtggatattctcatgagtcttgtatttagttgagaaatgttgtgatctaaaacaacatagcagtttgtccagggtttgtcagggctcacagttcactagggtccagttcttaccgtgcaggcagggtagttttcaggtgataagtctttgagtgtcttgcataagccctagccacagctgctcctggatcactgtgtggtatacagtcatgtttgctttgattaactgagcttaaccaaagatttaaaaattgtctacattgaaagtcatagagattctacccaaactggaatttgtcagatgtcagctggctagtggcagggccagaatctaggcctccaccccatctagtggctctatagtaggctgctggctttttctaagagtagtacctttccgtggtcccaagcatctgtgtgccaggagggctaatgaagggctgaggccgaggcttcttcatacagatgttcttttatggggaaaggagccatttatggcaaacatttatggaaggtgtccagaggaattttaaaaaactcaatccactgtaataattttctttctttttttctgtttgtttgtttatttgtttttcaagacagggtttctctgtgtagccctggctgtcctggaactcactttgtagaccaggctggccttgaactcagaaatccacctgcctctgcctcccaagtgctgggactaaaggcatgcgccaccactgcccggcttgtaataattttctatgcctagtctacaataaactttaataggtcaaaaaaggtttatctctcattatatatatttaaaaattccctgggcctttttagtcagacaccacaaaactctgaggggaggagcaagatgagagtctatgacttgtttgtgtttctgaatttcttggtttactaattctaggcatttctacagctctgctgtgagttcagctcaattatgcaaaacacaccctcatttccatttccccattttcctttagtttcagatttttacatcattgcaaatctgtataaaacctaccagattacctacaaacatcctgcgatctcccatttcctatcctgataactcgatttcttgattttatccactccccaatttggtctgaagaactgtaattcatttttatattgtaaaaactgaaacattgagtttttcttctgtatttaacacctagcttttggtatttgagtacattattaaggtcagggctatgtatttgtcaacagtagaactatgcagaatgtgaaacatatgttttccccatatacatccgatgtgaaaacccttttacaatgtgaagaacagtgtcctagcatagctgtcttatactccataaactaatcaaatccacagtacctggcattttcattgttatatttttgaaaggctcggttttctgctgcagttttcggttgcttcctcccctcattgggagaaaactcagttatatcttctagttcattttatctttttttgtttgtttgatagacttctggtagtaatcaatcttttaaaacaagacttatctttttgtttgatttcctctagttttgttgcaatatgtaataaaaatctgggagggaacgtgattgacagaattctgactccgtatatgtcatcggtggtctttattttcccctcacttatgactgacagtttatctgagacttgtacgttgaaaataacttcacctgaaaggtgtttctccaatatccttttgcttccagtctgcttgtgggcaaccccgtgtctccctgtagtgtctgcatttttccccctccgtgagttgtttgtcctgtgtcttgagtgtgtgggaatttcttagtgatgtgtctagggttcggttttcgctcatcctgtgtggcatctggcaagccctttcgattttaaagcttaggtctccttcccttctggggactgctgtctttacttagaattctacttatttagagggtaggacacttggcaagtcacctctcctgtgtattccctctaacattcctatagagttgttgtccatttgtttggagtagtctgttgtttttagatgtaactatgggctgaagattaagagctctgctccatgaatcaactcttttctctaagagcaatgggttgactaggaaaatgaaaacggttgagaaacagacagaccagcagttatagttggtatgatataaatattgttatgagcgggatcagagaaccaccaagattagcttcagccatgcagtgaggagtccccccaaagaccttacactgagttttgaacccaggtagaagttagttgtcaagcaaagtagtgaaagggacattccaggcatggaggaaggcatggagtcacagagtgcgtgaacagtgtggtccagttgtggtgccatacaggaattaacatgggctgagtttccctgggatgcttgaaggaaatggacagcaaggaggctgcaacagaggctcacactcaggagaaagagaagattgatatgtttagactcactgtcctgacagctggctaatgggtggagagcaaagctaccgttgggactatcataaggatctgaagaagacatgtacatcacatagaagtagcaggcaagggaaagaatgtggcatatgtggaggggccagatagagagagctgggcttactggagtgatgggtcaggggtgagcctggggtaactggagtgatgggtcagggatgggcctgggctcagtggggtgatgggtcagggatggtcctggggtcactggggtgatgggtcagggatgggcctggggtcactggggtgatgggtcagggatggtcctgggctcactggagttattggtcagggttgggtctgggctcactagagagatgggtcagggatgggtctgggctcactggggtgacctgtcagagatgggcaggtctgggtttggtcagtgtatggcttgaacttgccgagggagttgagaagaaggatatcttctgccttccacagaagagacatttcttaaatgttcagtaactcaacctaccatgtagccattgagtgatttgcctcaccaaagaatttaggaacaagaggacaaattcgatcttttcttggtcaccattgtcccttctgaactgagaacaaggctgggtacttagtgcctagtaaataaataatgaacacatgatggatggatggatggatgactaactgtagcattgaagagaggggtttctttgtagagaatagatgagtccagatcataatgttatggggatttggtgtgggtcacatggtggcttcctatttattatttactaattaacatttattatttttgtataagccgtttggtggccttttgtttattgtttattaatactatttattaatattatttatttatttcgtggaacctgtggccttgtggcattttaggcatgcacaataacaccaagctactttctcaacccttatgcagaggcatttgaaatgtatgaagagccctagaatcctaaatgaaactcttagaaaaacaaacataatacttccattgtcttgcatgccaatccagagctgtgttataatcttggggctagcctgccccggggcatttcagtctgggcagtgagtacgtaggcagagaagtctgtttatttcctgcagtgctcatttactccttggctacccttgcagactgctcgtcggtgagtctcctgggcctgatgatactgtcagtgtgactgaatcgctattctgggcagatgacacatagcccagggactgtctcttgctctctaaagatgacgatgtaataggatcacagcttcatagtgcacttcaggccacactgtagagcagttggtctaaggggctttatacctgagtgagagaaattgatcccaaaccccagtgacacagactttatttcagcttctcaaagaggctgcactgtcacttctgcccaagctacactgtcacttctgcataggctacactgtcacttctgcccaggctacactgtcacttctgcccaggctgcactatcacttctgcccaggctgcactgtcacttctgcccaggctacactgtcacttctgcataggctacactgtcacttctgcataggctacactgtcacttctgctcaggctactctgtcacttctgcccaggctgcactctcacttttgtattggctacactgtcacttctgcccaggctgcactgtcacttctgcacaggctacattgtcacttctgcataggctacactgtcacttctgctcaggctactctgtcacttctgcacaggctacactgtcacttctgcacaggactacaccatcacttctgcataggctacactgtcacttctgcccaggctgcactgtacttctgcacaggctacactgtcacttctgcataggctacactgtcacttctgcataggctactctgtcacttctgcataggctacactgtcacttctgcccaggctgcactgtcacttctgcccaggctacactgtcacttctgcataggctacactgtcacttctgcataggctacactgtcacttctgcccaggctacactgtcacttctgcccaggctacactgtcacttctgcataggctacactgtcacttctgcataggctacactgtcacttctgcccaggctgcactctcacttttgtactggctacactgtcacttctgcccaggctgcactgtcacttctgcacaggctacattgtcacttctgcataggctacactgtcacttctgctcaggctactctgtcacttctgcacaggctacactgtcacttctgtacaggatacaccatcacttctgcataggctacactgtcacttatgcccaggttacagttacttctgcacaggctacactgtcacttctgcccaggctgcactgtcacttctgcacaggctacactgtcacttctgcataggctacactgtcacttctgcataggctacactgtcacttctgcatagactacactgtcacttctgcataggctacactgtcacttctgcccaggttacagttacttctgcataggctacactgtcacttctgcccaggctacactgtcacttctgcacagactggttctcactcacccctgtgattctgacctttcctttcttaggcactggttctatggatgttgtgtcccctgtggagaaccttcctttattgaactctcaaagtgctttgtttattctagtccctgaggtgaactctgtatttgctactggaagaggtgtgtgtgtgtgtgtgtgtgtgtgtgtgtgtgtgtgtgtgtgtgtgtgtaaagggtgtggtggggggcattgcacaatagcaggcacataggataccttcagtagttatctgtgtgtagcccatcacagtatctctatgctaaggaaattcaggaggacagaagggagctatgcatactagtatctacagtgggctggacgactccccagtacacatgttcttactcaatgactgctgcagcttcaccacaatgcctcttttcaaatggaagagagaggatctgggaggtggggtggcttggcagtggtgttccatggccagccttgtccttctttgacttcagtctctatcaaaatgttatagttggatatagtgatatataactttaatcccagtactcattaagcatgggttagaagatctctgtgggtttgaggccagcctggtctacatagtaagctctgtagtagtcaggacttctctctctctctctctctctctcctctctcttttttccttttcctcttttttttctccctctccttcaaaccatgcccctgcaaaacaaactttttcttgtcaatgagcctttgttttaaggctcattgtctcaccagaggtagaattatgggtatattgagctctaaaagagggtttcttgggtttctagaaacataaatgcttgactggagctgaaccatgaaatatttcaaaaatttcctcctgtccatctccttgattgtgttgcctgcgtcttgaatttgatttttgtttttagggaacttccaggtcaggtagtcagagtcaaggacattggctcaataatgacccggttgagtcatgtttgctttgtgaactttcatctggtaataaggttggagagcgtagacttttacaactatttgcatatctcatttccttgcctaatcagtgttgtgagaataatgtcccactttccatgcttgagtgatcagctgcagttgcagcaggcaccagggctggctcgccacagcatttccctttcttacattccctctcatcccagctttgctgcaacccatgcactgggctttctgaaacagaactcatctcaccagcaaaatgacacctttcatgggcatggtatttgccctcaatttaaagggcactgtttcacagctgcatgatgggtacaagcgtcctccttgaatgtgctcagtgaaggtgtactgtgcctagactccacattaaaactcctttaaggaaaggagggagagccattaggtttaaggatggcttttttgatatgttcctatgattactcatgaccttacaaattgtttagtttatagatcacaactaggctaaagatgtcaggtgcctcttttcatcccaccccaatggtgttgatggcggttggtgagcttttatggtaaataaagctctttacttgagccttacaaggagtccctttgtagattttagcataatcttagttatttcctttgtagattttgacatgattttagttatttcctgatatcatctaatggaggggtgggcttgaggtttgaatctaagggtctatcctatgtcttcagccaagggaattactaagatataattttattgcttgctgaggatgggcattttaaagagtatgcagagggaaagaaaaaaggagagaaaaatcaatggtgtcagagaaggaaggaagggtgacttcagggaggattactgcacaagttgctttttctgttaatgtgacaaaatactgacaagaagcaacttaagggaggaagggcttgtcctggctcacagtttgaggggtttcagtccatcatgatgaggaagccatggcaacaggaacttgaggcaactagcaacattacgatcacagtcaagaagcagagagtgatgggtgcaggtgctcagtcccctctcctccttttgttcagtgtaagtcccagcctgtggattgtgccacaccagttaaccttttctagatggtccctcataggaatgccagatggttttctctagggtgattgattttaaacataggtggacacttgaccttgacatgaaagctgacatttcttgatcagagatggggaagaggaaaagcagtctggaaagaggaggaacgatagaggaactttcaaggttgggcaagaaagttgaagatgggtcatatgttgacttctctcctccaggtctaaggtgaagaagttggggtggtgtgaagcttggggaaaagattgtgtcggttagatctctgttgctgaaaacaaaggacccaataaaaccaacttaaaaggaaagtcagtgtgtttcatcattttgaagggttcagcacatggttggctttgttgcgtgggccctatggaaggcagtacattatggtgaggagtgttcatggagccaagctgctcacatcatggtgacagggaactgaggcaggtggggacagttaggagaaggggccatgtttcccatattcccttcaaaacacatccccaatgacctaatttccttctacaagcttctatgccctaaaggttctactaactcccaagaccaccacaagttggcgatcaagcctttaacaaatggggctttgggggatattccaaacccaaactgcatatatcaaggctcagctatttaaggagatagaatatagaggtgagagtcaagaggcaaagagctatagggatcatgaaacatggagtcctgagaggcattcatgatagtcccacataatagcaagatgtgacttatccctgaggacagaagcaggaaatggtatggttgggttggctcagttggtttgcaggagggacagggtgtggcagtggaagcgatgcctactgagaaggtttgaatcaggtgagtctgggagatgagtgtggaggagattggaaaaaggaaggcttgccagagagaaacccccttctcactactgttgggtacccggaacatgaccagaaacttctcatgaaggagattgacaatctacctttaaatatcaccaactagccaacccaaggtatctgtatgggaaatgttacagcagaaatgcctggattttacccaaattgtgattttagttgctgcccactagtaatagtgtattcaacacccccatcctcatggttaggcagtgaggacaggtatactagtgactttttgtgacaaaatacctgactgaagcaacttcagggaaaagagatttattttggcttatgatttttataggatacagtctatcatggtggggaagactaaggtgaaggcttggtccatggtggtgggaattaatcatggagcttgttcccatctattgacaaccaggagccagagagcttgggccttggctgtaaccttggggtttgtctataaccttcaaaggtctgcccttacccagtgacctgcctgaaccaggcatgtcttccaccctaaagtttccaccacttcctcagacagcatcaccagctgggtactgagttttcaaacataggtctgtgggacatttcatattaaaatcgtaacagaaagcgttggctgtccccagctctatgtctttctgtcctgaatgttgaagggatcctagtgaaatatttacaagaatatacctcttctgagttgctgcttagggtagcttcccttcccttgcttagtttctattcattaatgaaggtgctaagagatcagacgattcatctgagctgcagacggaggacttcggcaggcttgtctgggatctatggagaatctggaccactataggcagcagtgttggaacgttctctcacctgggtagagaggctttcctcccctagggggatggctcagaatcagatgcctttcaagctaggtggtggaattgcctctagggccagcaactgccctgctgtgggtctcttcattgcctcaagtcaagtgtcattgacttagctcagctaagaaagtatctgtaagtgtgctgtaggctaaagttgcctgctgtcatatgaaaactcaagcttacaatgtggggagtcatgctttacttccttaagggtggactatcgacatatattatttggaattcttctgcatcaatatttgcatctccttcatcttttgtcatttatttatttagtcacttcttctttttcttttacttctttggctctttgaaacatggtttcatgtagccaaggatgacttcaaactcaggtgtagtcaaggttgactttgaactcctgctcctatctttccaggccttgggttacaggtgtgtaccgccacatctgcttgatcacttctttgtatcattagatatttatggaagtttaattaatgttttgggttagaatctacctctacttcattttattttgttacttaaattatttcagttgtgcctactggaaattctttcaattggcttgagtctcttgtacatggctctctctctctctctctctctctctctctctctctctctctctctctctctctctgtgtgtgtgtgtgtgtgtgtgtgtgtgtgtgtgtgtgtgtgtgtgttaggtctttctttctagcactacaggatattccacactgatcttatattttccctgcaccagggtaaatcatttgccaaagaaccctggtttctcttcttatagaacattttgagagaacaagacttgggctctgtgtgttttgttgctataaggaaagtttgtgtatatacctatatataagtaaatatattcacttatatctttattaagctaaatatgaattcatattatacccaaactctgattattaccacatagatattctagacttttttatggtgactgtcatagggttttactgctgtgaacagacaccatgaccaaggcaagtcttacaaacaacaacatttaattggggctggcttacaagatcagaagttcagtccattatcagcaaggtggggcacatggcaacatccaggcagacatggggctggaggagctgagagttcaacctcttgttctaaaggcagctaggagaagactggcttcaatgtggttaggaggattgtctcattgcccacccccacagtgacacacttcctccaacaatgccacacctccaaatagtgccactccctgagctaagtatattcaaaccacgatggtgacttatgtgtgagttaccttctccaacactggaaagccaggctagaaccacccaccatccattatattataatggtagccagcttttagaactgtgaaccacatgggggtgcttagttacagcttggctttgcagttttcttagcctatccggatctgcctgctcctcagttaagttgttctgtgcgcttggctctttcattatagtctgcacttcttctggaccctccttatcttgtaatgttttatttactagtttttaatccttttcaattgcatacagttttctttctgtgctgtgagtttctctgatgtatctgcggatgtagtatcagacagagtagcttttcccatcctaaatacggtgtgcctttctttcttttcctttttttttttttttttttttttttttttttttttgagacaaggtttctctgtgtagccttagctgttctggaacttgcttcatataccaggctggccttaaactcagagatccacctgcttctgccttcccagtgctgcgattaaaggtgtgcatcaccatagacaggctccaaactttttcaacttggatctatttactatctccacagattgcagcttccaaaaatatcctagaggtaaaactactctgcaagcagcctttctagattagctcctttcactgagcaatgtgcactttaagattcatccacccatgcaggtttttgaaagcaggtcatgttttcaaattacttgtgtaaacacctagactcactaactatttggttatattagaccagcaacctcaaggaacctcccacctctgtctccccagtgctgggattatagacacaaactgcttcctcagcttttcacacggctagtggacattacacagtctctcgcataagagacaaagctatacaagatgtccttgtatttttctacaatactttgaggccgtggcagataaaagtcacagtgaatacttttcttggaaccctgaaaagaattcatttccctgggtgtgatctggcctctgccccctgtgttgttgcctggaggcctgggatgagcttctgggtattcagtgcgggaagatgtggagggaaggatgctgaggagagtcctgaggtgcagacgtttttagcacttgctccagggtgctcagtcaaggtgctaggcatctgatgctggaggattgtgaaaagctcagccattctcttagagtggggtgggtttattgaattaactatttctaacgtgcccttttaaatcagcaatgatgaaaggcctctattttttttttttaagatttatttattctatgtaagtacactgtagctgtcttcagatacaccagaagagggaatccaatctcattaccggtggttgtgagccaccatgtggttgctgggatttgaactcaggatctccggaagagcagtcagtgtacttactgagccatctctccaaccctgaaagacctctttagaaaggaaagcatcttcctttgcctttctctccatgttattcaggggtcgaaaactttccagaaacttcacagaatgttccatgtgtgcccacacatcttcagtgtctttcatactgactccagtcccagattctcacccctctcaggaagtctgcaagtgaaggggcagagactcccctggcagggaaatggagacatgcagacgctgagtatttggttactcttgacatgggctatcaccaactcttaccgacttgttgctcgatgttcattttaggtttctatgttgagtgtgtgtgaggggaagggttggggagttagtattttcctgtgcttgatactcatatttctttgtttagtgacttttccttttgtcccatttgggattttttatttgctaagtgtgtttaattacttttccggttgtggtaataagataccttgacaaaagcaagtcgaaggaaaacagcttatttgggctcacaatgtgagggaagtcctagctgcgggaggcgggagatggaggtacctggtgcctttgcctgcatatttaggaagcagagcctcctggatgctttgtgtgctgcttccttcttccctttggcagcccaagccccgggaaccttgctgtccttcttcaccctgactcttgccacctcaaccaaccaaagcaagatggtccctaacaggccagcccggagactgcgctactgtaactagcccctcccaggagagcccagccatcagtgctacctggcacacactaagctcgttgcccccatccccacaccagtgtatcctactgtcaagagcatccatgcaggcaggtggtgcaccacaggcctttgccaggtgaggcactgagaactgctcccctgcctcagagagaagtgcagttaagttagaagctagctttaagttagaaggtagagctagattccggcttggtgtgtggggcaggacagggagaagtggaagtagaggcattctaacatttccagctgctttgtgcctgaggacgtagagcagcctgttttcttaggctaactgaatggccactctctgggttgtagtgtgatttctgttcacatccatagttttgcagcttgcctttcacacccgcctttcaaagtttcagatctgagttactaagtttttcaaaagttaagtaaatgtctacttattacacataacacacacacacacacacacacacacacacacacacacacacacccaacacgtgtgtatacacatgtgcacaaacacacatgcacacatacatgtgcatgctggtcttttcctaagtataactgtgttactttctttcactctctaaaatgttcctttccaggaatcgaggcgacatagcatcaatacataaaggcaatcatgacaaatgtgttgctgttttccttccatgtcctgccttgctgtcttcctctcccattggtaggaacgaggaaagagaggtgggggctgcagtccaggagctatggaagcctgctggagttggccttggagttggcccctccttgtttgataactgggcgggcacacctctccctgcagaatggctggctccctgtcagccacacaagggctgagttcacagtgacttcagtcatgaagttgaatttaggacattgggacggcatttaaagggcacagacgagaggtgttccactctgagctgttagcgtggcttcccgcgccagtgtgtcagagccggctcatcagcactgagcacatggctgagatcgttccgtacatcctcacatcatcaaactgaactcgtggaggacccctgaaaacattggagtttctgatgctgtgggctggggcataagaatttgcatttctcgtgagttccttgggcaggctaatatccatgtttaaattaatctgcgtaaatgattcccatgaagcagggagtgggatccacatttcaccttaaggagtcagcagcaagggtcaagggacttggctccaaaactcttggtgattcacaagcacctcctagctcaccttagcaaagggagtaggaagggccacaggaagcccttggaagacagggagaggtccagtgagctgggatggggtgggggctgatgtggtttgaaagttaggcaaaagctcaggagagctgaggggacttctgtgaaggaccagcctttggcgggtgctggagggtagcacagaggccctggtttctcagaaggaaacctctagaaggacagggaaggggttaaaggaatctgctctgtagctcattttctccatacccacccatctttgctattaacatgtcatggctctgtggaaagctgtctacactgaggctgtttgcaggagagtctgggcacactacaggtgtttgtgtgatctctctatgccagggcactgcttataagagaatctttctgtgccatgaccctgtggctactaccctgccagtgctgtggtactctgtgggtggtactctctctttgtgctgtgattttctgtaagtcttcctccctccttccctccctcccttcctccctttccnnnnnnnnnnnnnnnnnnnnnnnnnnnnnnnnnnnnnnnnnnnnnnnnnnnnnnnnnnnnnnnnnnnnnnnnnnnnnnnnnnnnnnnnnnnnnnnnnnnnnnnnnnnnnnnnnnnnnnnnnnnnnnnnnnnnnnnnnnnnnnnnnnnnnnnnnnnnnnnnnnnnnnnnnnnnnnnnnnnnnnnnnnnnnnnnnnnnnnnnnnnnnnnnnnnnnnnnnnctccctctgtttttctctctccctctccattcctccttcttctccccctccctccctccttcctccctccacctcatttcatctccccctccttccttccctccctcttctactctctcttcctccctccctctctctccctctccctctgtctttctctttccctctccttccctccctccctttctcctccctctctctctttttcccctccctttctctttttcccctccttccttccctccctctccctctctcattctctttctctcttcttccttccctccctctttttccctctctcccgccttccctctctctccctccctctgtctccctctctccatcaaccctccccttcttctgtgcctctgtttgagtgacactctaagtcctacttcctctcctctcatcatgttccttttccatgttttataaaagatggaagaaactttaaaatctccagaaaagagacacatgatgagactttcttttgagttaattttgtgatgttttaatatttaggcacacacatgaaacaaacaaacaaacaaacaaacaaacaaacaaacaaacaaacactccactccagttagagaaacccccgtggacatgtagacaatgaagggaggcctctcacatcccacacgggttcttccagtcttagcacgtgtgtgcgctcagatctgcagcttcgtatggggagatttggcactgtggaggtgtgtccggtgaggttgtagcaggtggtctccttagccaaatcgtactgacaattttttaatagatcatataatatttgaaagatattcaaattattttaaagcagacattttcatgatatatcctccagtgtcaggttttcttgagaaattgggagctctggtgtagacgctgtctgtccctggggaagggccagactcctgtttatggcaccttcagcacaggtcttggggccctggcatgtactatcactggtttagaaagttgtagacttggaagaccttccacctgttgggttgagggactttggggcttactggagtttcccctctcacctgtcagccatatgtgtgtgtgtgaaccgggacctgtggtggaacgagtttttggaacaaacacttcctggtaatctatggacttggaaggaaatctccttggcaccgtctgtgataatttaaaccatttctttctttctttctttttaaaattataatgtgtttttaaaatgtgattttataaattatcattattttaaaagggccacgttgtctacatggtgctttatagggtctatctggccacagctggagcacttctgggtgttttatggcaaattattctcacattaccctttaatgcaggaagggctgcctgttgtctgagctccccgggtcatacagaaacccccagccttgatacaaaacagctgtctgtgttccaaggaggagtgtttcaggcagaggcagaaggaaaaagggtttcatggctggtggagttttaaaaaaagtttaaattactctttccttgctatttaaatgtgatttaattttgttaccaacacattgtgtaaacctaagagagaagggggtttgttaagtgtgttctggcaatacttacagtatgtcctgagggggtgctccccagggaggccagcacaaatctcctgctgacctccatgtccctgggcctcagtctggctgggccagggtcagaggccaactcacagacctccctcccctttctcctctgggtccctgctgagaccagcaacaaaggggccaattgttgaagacataccctggtctgaacagccttgagcctctctgaatgccaaagtgtatccatgcacactggtgtgtgtgtgtgtatgtatatacatagtgtatgtatgtatgtacgtgtgtgatggttcttgcccatatattcatgaagcatctgtgcaaacatatgcattcacacatatgcacatgtgaacaagcatgtgggcatataggtactgtgaggatatgtttgtaagtctatataaatgtgtgttcatgtatatgaatggatgtttccatatgcatactaatgcatttgtgtatagatgtgaggatgcatgcatgtatgtatgtatgcatgggggggaggggtgtgtgtaacttgattaaagcatttctgagttactgttgcatcttagcagcaccagtggcctcggaagctggactgtccaatggtagctcctaaggccgaggggataaaggagctggtttcttagcaggttgcacagctacctctatgtggtactcgccctggtatggaaggtttggatacattgctccttacttattttccctgtaggaagcagacagagcagccataagccttctcctcatgcagcagctcttagctgctcattggcctattctgacctgggcttccaagctaagccctccagagcttttctgttcccttcctgtcccttcctggggctgcctgttagatccagtacattctgtgaggagcaactatgagatgtcctgacctcatcaacactctgacctagttccctctgagccacagggctctgcactgtgtgccatcattttggtccttaacatggactcttacaagtggtttgttaggatgggtggctggactggccttgggtatgtctcagctctgtctgctggcatctttggggctcagattttcctttttaacaaaattgttcctaaaaaatgacaagactcaagtgactctgaaggtggggtgaggatgagaaatctcccattcctgactggtcttcctctgcagtcgctcctccctgcatccctcaacagcacagctgccagggaatggctttctgccttctctcccgtcttgtcccccacccccagcccctgtttcctctttgctcccagcaagagcttatctttcaactgtggaaaagccaccaattaaactttactccaaagcttatcaaaatattcagtcggtaaaattatcttataattagctgaactgtaagccagaagtctttaaccataggaaacggtaacgtgacccagcgtgtggagtctgtaagttgcttgtcctggccttggctgcagttgccgctttttgttctttcccagtcatttcctccctgttctgcatgttcttaatggtccctgaggcctcaaagaaaatatactactaagattagcagagatagataatggaacaaattcagttaaaagtaatataagatctacttgatttttaatattttatgcatgtacatttatatgcactttgtgtctatacctgttcatgcatgtgtgtgtgcatatttgttgggggatgtgcatgtgtatggaggtcagaggacaggtcctgttcacctgttttatttatatattagatggaatctttctctggcttggaactcaccaagtaggctaaactggctgaccactgagtcccaagactacctgcctgctcctctctgaagctgggattacaagtgtctcttattacatccagtttgattagtgaggttttgaatggggtattgaactcaagtcctgcttgcaaagcaagcactttatcaactgagccatcttcttagcccctgcttaattaattaattattaagtagacgtatgcctactttcccagattctgatgtcttgccatgactgggcctgtattttggatgactgcagtggtaactcggagctaaattattctggagccttgctgttccaacactatccagggcattctgtggcatggccggctggacaaccactgggctttcttctctcagttcgttcctttcacagagctctccttcccctatgtgttctccattctttctatgatgccactgaacatggcagcatcgggcatgccatctgtcaccccccacccacatctcctggggacagcaaggaaacagggatggtgtttgggatcctaaggtgcagtttaggctttcatgcagaagcgatagtacagggtactttgggtcttaattgctgtgagctcctgaaattggtaatgccatgggctggcattaatgggctcaggagacttacgtgggttcactggacactgattatcaccttttctatagtgaaatgcttccaaaattctaaaatcaaattgaaaattaagttttgtgatgcactaacattttcacagattacatatagtattagtactgtagttaatattgattgttttctgtatttgtcagagaacaggcatacacatctacacagttacagttaaagaacacctgcttcatccttctattattctagcaagggagcaatgattctgctcatcttataatgaggaaactctaaagagcctctataacttgcagatgactgctagcctgactatcttaaccactgctcaccttgtatggactggccaagggtcatggcttaggatttcgaccatgtatatttgagagattctcattgatacttgtgagaataaagaggaggtcacagttgcatctcatcctcccattgatgtcatatcctggtgtcacacttaacatctcttgaagttacatttgcattttaggcttgatttctctactgcctatagaatgaatcttgactggcctcgagctgatgggatccctgtaaaggctgagggaatccccaggaaagctctgaatcgggtgtccaatctcttggtgtctgagtccatgtgatgctcccatggaagaggtggtgaggggagtcactctaggcagtactgtcctaatgcaaaccttagtatcagctgcatgctgacaccccatccttctgctgctgtcccaagagtcctaccctacaagttcttcccaactaaagatgcagtctgtccgatccgcaatgaaatgtttttggccttctaaaggccctttctaaatatgatgaccttttaaaacaaagttgaaatcaaagatctatcattaaaagttttattcattaaacaagtcccattagaaaatgttttaagatttatttttattattttatgtgtatgaatgttttcctgcttatgtgtgtatgtgcatcatgtatgtacctactgcacacagaagccagaaaaggacaccaaatgccctcaaactggagttatagctggttgtgagccaacatgttagtcctggaaactcccgcaagtgcttgtaaccactgagccgtctctccagctcaatacattaggaatatttaaaagtaattgaccacattgaattaattttcttgcaaattcagcttgttctttatgttatttaatttgtatttttctctctgttcttaattacagcttggactgatgatagccatccgctacagccacaggtaaagcgttaaaatcttttttaaaaagaaatatatttgtggtttagaggttttggttttcttaggtcctaaagaattttgaggtttgtgttttgttttgttttcttttttgatggctgcttttctgtgatgtggatggcaccgttgaagttgctgtttggagggaaacatggcaatggtggaacattttttcttttttcttttttttttttttttgtttctgtttttgtttttgcttgtgttgcaggctggcctcaactttgcagtcctacctcagcctccctaaggctgagatcacaggagtgtgccacagtactcagttcttggtttttccagttctgattttcctgatttgactttcaaattgctaagatcgcaggcgtgtaccactgtgcccagcaacattttctgtaggacacaaacttgagaagctttgtgttaggggtgcagatgtaatttctgtgtagcccactgagcttgagtctgggttagggattcttacatgtgtggccaggccaagactgtttgtagagccctttcctaccccaccagcctctctacttcctacatttggaggaggtgaaacacctgtttttgtcttgcttcatgatttccaccctggtgttaattacatcatattaatgggaaaagcccgcatcattttctagtaccatcatggcaatcttgttctatgaatgtttgtttccagaatcatctttcctatttgtgtgcttcaagatatattatgctggatgaattaaaatgaagggttgatatgcaaggtcttcctgctctcatgcacacgttgctcgaagcttccccaaagtaccacccttgggtcaaccgtttgctgctcaggtttatctggccagctcttcacaaacatcccaaaggaatattgggtggcagaacaaatttgcatcccccaaggtacttgttacaagttgtatgtacagttttgatctaagtgtgagattcagacagcttctgagaagcagaacggggctatgaacaggcagagggcaggaatagccttgaacttcttggaattcataagtgagaagagaagtgttgaaggaggatattttggagcaggtggaagaaggctgctccagacagcttcgtggtcacacaggggcaaagaaatatcttttccttgtctgtaatctaggctcatggctgaggtcccataacaaagggcagaaaacgagagcacagtacacttgttcatttaatatgctttacatgcacaggagctttcacaagaaaagggagacctaaagtgaagaagtatgcttagacaggggtaaggggatgagaggggtgcaggtgggggtctgagctagagcagtgcttctcaacgtgtgggttgagacccctttagaggccgtatatcagatatcctgaatatcagatatttacattatacataacagtagcaaaattacagttatcaaagtggcactgaaataatgttatggtttggggtcaccaccacatgaggaactgtattaaagggtttcagcaatagaaaggttgagaaccactcaactataaggaatagactcaaatgtcccctccccacccccttttttttatcagcttcttgctgaactctgatgtcctcagacattagtatgctcctttgggaattaggagggctcaaatgggagtcttttgatctgttttggtgatcttttctgtaaattttttttttctccaaggtgctgtgctctggagcaatgtgtctcaaactctatcttttgtctgtgtgtttttgggtctgatgtctgaatggggtgtgtgtgcatggtgtgtgcacacacagaaacgctgtcttgaagaagcatgctggtctctcagcagctcagccaggttgatacagctgatgggatgcatcctactgtgtgcttaagacaggcagcaagcaccacactgagctttaggcccaaagtcaataggatgctgggtggattgtatccagcaagaggtgggaaatatcaggaatggagcacacatcactttaattccagcactcaggaagcaggggcaggggcaggggcagaggcagaagcaggcagatctctgtgagtttgaggccaatctgatctacagagtgaggtgccctgtcttgaaaagacaaaaaaaaaaaaaaaaaaaaaaaaaaagaatgtgctaaatgtaggccacagaatggggtgtttgtgtgtgtgtgtgtgtgtgtgtgtgtgtgtgtgtgtgagtgagagagagagacagagggacagagagattggcacagacgtagagagacagaggcagagagcaaaggattgtgtcgtacatctcctccctcaagctctgccacacttgcttagattctgtggcagactacattttccaaagatggtgttctagtttcacttctgttgctgtgataatacagcctgacagaaaaaacaacttaagggagaaaggatttgatttaggctgcagatccaggttacagtccgttaccgccaggaagaacgtaaagcaaccagccactccacatccacgttcagaagcagatagaaatgagtctatgtacgcttagtattcggctagctttctctacttttatccagtccagaacctcaaaccaaggcatggtgcctcctcctcgtaggctgggtcttcccacatcagtgaaggcaatggagactctggtcttgctcagcctgtggccacacgcacgcttacggagtatatttcagttcctgtggctgcttgacatcacttatctgtcatttatctgactgacatattctatagaccttgggtactgagcaagcagtggagacaacttatctctgtttcacagactctggagcccctgctggaagtcttgagggctgggggccctgtcatctgaaactgtgattggcttttctggagggaggtgccaactgatgtttttgttatggagcataaatgaagctaggaattcctttttggaaatacagtatatcacagtatcctagtgaatgagggagaaatgtaaaatgccatcttttctacaaagcacttgacagagagatgcccaaaggtaattgtgaggcttaagaacagatgcaacggaaaaaaaaaaaaagctgggcagtggtgttgcacgcctttaatcccagcacttgggaggcagaggcaggcggatttctgagttcgaggccagcctggtctacaaagtgagttccaggacagccagagctacacagagaaaccctgtctgggggtggagagggggggcgaagaacagaacagatgcaaatctttgaggagggggttgggggaaggagtcaaaggaggctttgtagagaacgtggctcctaaaccttccttattcctcaaaagttgagaaagcaagagagaagcctagctggctcaggagacacctggtaggccgatcacatggattctttagaatacatgctcttcaaatgattgtttttgccttgatttggaagagaggccgacttggtgtagggttgaaggtgtgatatgaattctagctgcttctggttgcctctacagatttaatggttccatcttgaacccaatcttgatcccacttcctgcaacaggagttcctcagagtcttagatggaatgcagaaaggaagtccatcaactgtcacataggaacatattcagtattctgtgttggctccaaggtgttagagttctgtcaagttatgtaaatgcagcaaaaaccaaccaatgaaccaaaaaactaatagaaaacaagctggagatgttacaattaaaagaatagagtctgaggaagaatgacttttgctgagactccctcgaagttttcaaggtcattcattggctttttaccttgcatctaaggatctgagatggagaggtgacaacataagccagcagccacaaaaggctgatggagcacttggcatcacatgtacaggagtcagaagatcataggaccatgagtttgtatgcaacacttcaatccatctttaggactttttcattctatcaaactgtaactgtattaccattaaatagtaaaaccctctcccatttctccctttcacatctatggcaaccatgtgttactttctgttttgatgatttaattactctgggtaccttatattggttgaatcagattgtatttgtcttttcatgccaatcttattttactgagcagtgcctagacattcttggatgcagcctgtgccagggtttcctttttcattaaggccagtattccattgtggctgcctattcatttacccatcaactgactcaggctgcatccaccttttacttatagtggatactgctgttgaaactacagtacacaaatgtctgagtccctgcttccacttcttttgggcttatatccagaagtagattctgaatcttgtggcaattctacatttaattatttgaggagtgttcatattgtttctttctcatttccacttgaaatggagtcgtgccaagttggtgcagttctggctctttcagaaacccacagctgtgactgagaaaggatttccagtttgctgttgagtttcagcagaactcagatactgggttttctggtcttctttgtgcggatggtaaggtgttggggagcaaagtatgggaccttcaggtctcatcaccagactttcataaatattccagcagaaagttcagggcaagatcaatgtggacatgagaaactcaataggcacatagtggatagagatggggtaaagactccagagagggcagatggttccagagtaactgatggggcaggatggcttctctatagagcaagggactggaggcatcttaaggagatgagggtaaagaggagatgagggagtcagtaaaatcatgtaaccgtagtgagcaggcagcacttctgctgtggacagagctggggacagagctattctagaacaagaggggaccctgtgtggtaactaaggtacttgaggccccaaagcatacagtggtgccttagacaaatctctcccattaaaaagaagcatgtgttaggattaaagacatcctccagagcacacagacattcacatgtgcctacacgtgtgtctacacccacacccacttcacccactttcacttctgccccaaggcatcctccattcctgtatatccatcattccaggtttgtttgtgtggcataggagtgcctatttgaatataagatgccatatagggttggtgctgaggcagggaagtggagaataatgcagctgtgttcagacagcataaatgtgcaatacaaggaaaatactggccatggctgatggatatttgacagcaggtctttcccacagaccatttattatcatgatgccttaatttatttttataaagtcaagtcattttttttctgcagagtggaaaattgtctctttgatgttcgtttcccattgtttagcttgaggttttgggtggaatccacgccactgtgacgactgggtaaccccgagaagtgccctttgcagataacagctcttggggccccaccacccacgcagtgggaaacaatttccccagtgtgtgggtgtttcgttttgttctttctgtaaggttgaaagagtcctcttcctttctgatccagcgctgcagcctgaagaaacatgctccttcatggtggataccttgaggcagccatgaaagaggaaacaggcttagaaatggcccttcacctttctctctcaccctctgacactggagtaaccacaggagccaatggtgtggcagttttgcatgagtcactgcattcatatttctaaagccgaagataagagcaaggaacaaacctgcaatagaatgattttgctagtttgttttgttgggtttctttcttaaacagataggaaaggaagcacattttccatctaatatggttacaggaaagtccacagggttctaagttttagataaaactgaataatgattcttctttataattgacttatatttcctcgctccccatagaccttgagaaaggtcaacttagctgtccactgaggctagggcaccatcaagactttgggattataggtaacaatttttccaaaggacttgatatctctcaaagtgtgctggatagctctatgtcaacttgacacaggctaaagtcattgaagaagatgggacctcaattaagaaaatgccaccatagtatccagctgtatggtattttcctaatttgtaattagtgtgggagggtccaacccattgtgggtagtgccatccctgggctgctggtcctgggtgctataagaaagcaggcctgagcaagtcatgttgggtaacccagtaagcagcacccctccatgagccctaatcagctcctgcttctaggtcgccaccctgtttgggttcccatcctaacttccttcaatgatgactatggttgtggaagtgtaagccaaataagtcctttcctcctcaatttgcttttgtttatggtgtttcttcagagcaatagtaacctaagttgagacacagggctgtggagcagcaaaggggacagcagaattggaggtcctatatatagtcactcccagagaggtaaggggtgtctgtgcccagcatggccacccttagatgaacatgcagatctgcgtctgaacagtcattccaagtggtgctcttgcttttgttttgaatgggttggcaagaaataaaggggtcatgcacccttgtgttgtgacttggattagaatcagagtctacagttggcagatgagtcagaaagcttatcgaatgggcaggtgacatcaagtaagtaatgcagttgtcatcttttgaaatacaaaagtaaagacaagaaacagggtcatctgggccattgggttttgatttcgagtgctggcaaatgcctagtgactcccatttggagctggttttgatcttgtggggtcagttgaggaagaatgtcattctccacattttgtaaaaataaaataaagtgactttccgccctactttccattttcaagaatagttgtttctgtcaccaggtctctggctggctgctttatctgtctctttctcaaacttcacagtaaggctctgaccagatttatacaaaagagttgccaagaattattcaactctgatggtagaatcttaaaagtcaagctatctttagaaggttgcattttttgttataacctccctacaaaatattattctcaagggggcagactgcagatcttcatggagtgtccaaatcatgtgtttttacttagtgttttgagagctgtgggttatgttgttggtatttcatggtagaactcagcatgggcctggggctctgccttgagagtgacaagcactcttcagggtagatacaccttcaggtgtatcttctaccccctgcaatccctcatctcctctcttgttagtggccttcttataaagggaccttttcatctaaccttaaacctgctcattgcatgacatcaccagactcacagggttgtctccaagggttctctgcttactaacaaggggatcttcctcacacacatctgatacatactcagaagcctctgtgggcttccaggccaggggcatgaatcctaatccttattagcctggaattctggatccatctcccctggagactcctgtaccttcatcctttgaccctttagtaaattagcttccctcctctcttttttattggtgacctcctttgtcactttagccccttgggatgttttagtctttttgaagatttgtcaagaaccagttctcctttcagttgggtctcatgatgttttctcaagacagtttctaactctatgtctactttctttctttagcaggagataggaaggatagactatattcctgtcactgcacattggacctagcctatactgtctcctttcccatttgcccttgggggcgctaagacctaagaccatggactgcttgctgtgctgtgttgttcggtctgagaaaacttggattttgctttataatcactctctgaaaaagtgacctttcccttattttcaaaagactatgacaattatatttcttatcactatgctaaaatacttaaatgtgcaactaaaagatttattttggctcactgtttgagggtgcaataattacaggaaggaatgatggggaagggaggcgtgggggctggggtattcagcagagaaaggagaataccgacatccagatagccttttcttttccccagttttattcagtcccaaaccccagtcacctatgttggatgtaccacctgcatccatgacaggacctgccccctcagtccttccaagggcatattcttcccttctgcagtgccctctgtacatcttgatagctgactcttgaaaaacacttctctaggttgttgtttgccaagaaccctttcaatggcctccttagcttaagctctctccttttgaaatgaatctacatggatacaaactgaaacctttgatggttgggctcttgtcctcagatcacctttcctactcacacagtgccaagtaggtttgtttctctttaatggtgctaagcccttaacaatctcagctgcttgttctacactcacctacctcttcacaaggtcatttgttcatgtgcctttcgccaccaaactgcacatttttacattttctgctctttttcactgtgaatgtgactaataacagcgagtagtagctatgccacatttaaaccctgtgctgccttgaaatttcctctgcctgacaaactagcccattactttagaactcagctttattcaagtgttttttgttttttgttttccttcacatatgcagtacataaccagtactttgctggagtatgacatgaatagacttcttggagtctgatgtcagagtagtcaaaggaatggtgatagacatgctctgtcattttggaagaggaggaagattgccagtgcatgcacacacatgcgcacatgtgtacacacacagacacacatgctcactaaccttccttgtaatcctgtgtcttggatacctgttggaagatgctgcccgccttaagggtaagcctacttccaccagggtagcctctagaaatgccctcacagaaatgcccagggatgagtctcctaggtgattctagatctcatcaagttgacagctaagcttaatcatcacagtgctcaaatcaagttgatcaagagtcaacataactcaaattaaaatcctaattatcttttatgtagaaattgacaagtcaattaccaaactcttttgtaaagacaaaagatcttgaatttacaatattaatcagacttttgacactgtggccaaatgtctgacagaaacaataaaaaggaagtatagatttattttggctcatagtttcagttcattttggccaaggggcatggtggagccaagttctacaacttagagcagctcagggtgagggagaatgtctgtatacacaggctctctctcttcccctttgttctcatttgggtttcttgcctatgtgatggcctctacatttgaggactgtcttaccctaggttaattccttctgaaaattgccacagactgtcccagaagacatatgctttattgatctccttcttaacccaatctactggacaaccaacattaacctgttataccagcaatcttaaaaaacaaacatcgagagcttattcgagactgactgtaatgctgcagtagtcagctcagtgtgtctttctttaccacatatcgtccctaaatgtaaaacctaaagctatacacccagaaaagaatgaagagaaaaatctttgtgaccccgtgcaagccatagctttcttcagatataaaagacatataggaaaaggtaggggaagtagatttcattaattaaatacgagtgctgctggaaacgcagggccaaaagatgaaaagatggtccacaaactgggagaaaaatatttttccagtgtacatctgataagagacttgcatcaagagtatatagaaaactatatggcccccttgacaagaaaataaaggagcccagcttaacctatgaacagatatctgtacagtgaagagatgtttgacaccatcaattattaaggagatgaaaatatacagagtgcacactagaatcacttaaaagactcaatatcctccaaccccacactaaccagccgatgagatgtggatactccccttacagggagaaggcgacacagtgaagccacttgggaaaggattttgatagcttctggtaatgttatatccttaccaatttagtgattctacttctggatatttatacaagagagatgaaaccaggcttgggtgctgttgtttacagcctttctatgtataacagcctcaaactgaaaacagtcccccacacccagggagatggatgaaggcgaacacagccatgtaacgaaatacttagaaccagaaggcactggcatgagtgaaaagatgcaggcgtagggttcacgtaccatgtgactccagttgtaagacctgaggaagtccagctacacctcagcggtgtcccgggaagtcttgactagaaacagagctgaggagtttgggggtggagggagaggtgttttaaatcctgatggccactctttgtcttaaaggagttttactgtaatgagattgtggttagcagactgacgtgagttagagagagctgtggtagggaagcctttgcaacaaggtttgctggggctctttctagaaggtggcgtttccgggtctgtcttccaaggctgccgtgtgtgggcccagggggtccttcatttggagctgtggtgtgttttccgtgccggggtaagacctggagttcatgttttggctcatttttaccgctttcaagtggtcaaatgggtgtgcagttgcacttagcgcagccctctcgactttctgtgacttgccacataaacacaggtgcagccaggtcttttgtcagctgtggacattccagatggaacagagcttgagcggggggcctcctcacgggggcagttcagcttgaggtaattggatttgaccttatccctcacccataagactgctgccaggcaagagtcttggggtctcctgagccctcgggagcgctgggccagtgtgctgggcttggcgtaactttccttcggtgcaggtgcctgaggtcacattccaggaggctcagctcatcctatccgtctggaaaactcacccgtggctgacctctccctggagaccgaggaatggggtgcagctgtttgcaactctcaccagtgagaaagcagctccgtgttctgctccggtgaaagtggcaggtgtcattccggtttccacttggttgactgtcattgagtgctgggcagagggcagaacatggggcacttggtggagggcagagaaaggagcctgggtaaagcctaacagcatccttgatactacactgagcatgctcagtactttaccaagcggggcaatattatggcagttcttccagagccaactccgggaaaaacctgctgctgctttgttttggcccaggatggaatgacagagcctgcagttgatggaagaggcagtttagcaagactgttcatattctagccaggctgtgggtagtggggactggctagtcatctggtatatcgtggccttacctgcaagcctagttctgtttctagattttctcttaaagggctttctcagattctattgcagggttagactggcatcacaatttgaaggctctgccgcagcaaattctacctcctagtcaccctcatgccttttctttttctttttccccgtatgagtcatactttggtctctcatgttccttaagatcctgaaactgaaaatcatcttcagattacatgaaggttggcctgtggggatgctgggaacctcttagaagggggagtactaaaaccgtcagctctagacccagtgtgaaggagcggtgctgaggctgctctttcttgtctttcctgaggtatcttatcttagcctttgcttcctgttgaggttgatagcctcaaatgtcatgcagagaagctgctgtagaaatttaaactccctgcattttcctacagtggtacacctgcttatgccagcacctgcctctgatattcaagctcatctctatcctttttagagtccacagtggggctggatgatggggaggggggaggagccccacctgtgtactccatgccagcatccacaggttctgcctaaggatcaaatgtgtctttctccacatttgcatgatggttgacataaactgggtcagtatgcttcgcctcttagtgacagatggtgtggctatctatctatctacctatctatcatcatgtgtgctatatgtgttcatgtatgtgtgtgtatgtatttttgtgtgtacacatgtatacaggtgcatgcttacataagtttatgtgcatatagaggttgatgttaattgtcttttatcttattttttttttaagatttatttatttattatatctaagtacactgtagctgtcttcagtcactccagaagagggcgctaagtctcgttacggatggttgtgagccaccatgtggttgctgggatttgaactctggaccttcggaagagcagtcgggtgctcttacccactgagccatctcaccagcccttatttttttttgagactaggtctctcactgaacctataactcactcatgtggcaagaataactggtgagcaaggcccgaggtcctcctgctgcctggcttttaacatggatgctgcagatcccaactcaggccctcacggttgcatagcaagcgtttactgactgagcgcctctccagctgtagcgtgattatttgttgatgcttctgctagatgatttcctttaaaccagaatgattttgaccccaggggatgtttgttgattttttttttttttttttttttttttggctaatccaaggtcagagaggttacttcacacacttaatggatagaggctaggggtgtagttaacattctataatatacagctctggaacagactgttgaattgtctgacacaaaacatgaacagagcccaagtggaaacccactctagacagagaggcccaagaggccagcacagtgaacattctccctccatctttaggactggaaagtatcctgtgctcagttaacacagatcaagtcaggtctgtcattcagtggctcatgagctgtgttggcttttggattagtaaaatattctccaatggtcaatgcaatattttattgttgaatttgtattatttaaatataaaggttaagttaacttttaattaattataccagtgagtgggctagaatggttatttcttcaacatggtggatcactgtgaacccacctgtggttgtgtggtggtgatacagagcagactgcagcagccttcctcctgccctgggtgacagaacccttggcataaactacttaagaggaggacggattctcttgctcatggtttcagaaggcttggttcctgagcatcccatgccctggcagggaacaggtgcttctcccttgacctgctttgctttctatagctgtgataaagactgtgaccaaaagcaattcaggaaagaagatttatttcatcttataactcacaggtcacattctaccacagaggggagtcagggccacggaggagtgctgcttactggcttgctctcatcctgctcccttgtataatctaggaccacctgcccagggctggtattgcccacagtgatcagggctctcccatatcaatcattaatcaagaaaatgctctacatgtttgcccacggtcaatctgaattaaagttccctcttcccaggatatcctagcttgtctcgagttgacaaaaaatacaagcagcacgcctccctatctgtatcattgtaacaattgcaaatcccatcctaattccaaacaaaaacgcatcttattttcaaaataaaactcaagtcagcagctcaaacagcagttttaaaagtcaagtttcaactcaaaataatctaaagatttactaatttggtacttacatagggaggaatgatggtaggagaacaggttttaaaagatttttgttttctgtaatcaagccatcatgtttctgcaagaggaaaagaattgtgtgtacagttaaaaaacaaaaacaaaaaaacccactgcattgaatagcacacaatggtcttaaatcggagaggagatgtttcaggtgttttggcattccttgagtttgcgtggggtgtttagaaccacggctgtgttccacagtgtcgctcagatgggtgctaccaggaacaccacctatgcattcattgtgtgactctgagttgctgtttggttgcgtctgaaggaacatttcactgccaccatatttttgcaagcttcaccttcagtcacatgacccacagcttcaggatctggctcttaagtaaccagcagttgcttaaatcctgtccctgtaactaccacagccctaaggggtaaaaatcaattctgtcttggcagcaagggaatctattctcagaggctaaagaacctgtccaagaccacgtgggcgcttaatgaaggtcatcgtcttccgatgatgctaggaatccctatgtaccttgggatagtagtggatatgagagccattcgagaaaatgttctcagaaaaatcagagctacttcatatgagaaaatgcagggatggagcttcagaaagagagagagagagagagagagagagagagagagagagagaaagagagactaccgtaagacccatgaggagacatgcaatggaaatctagctctcatgcacgatcacaacggctatggctttgcccagactcatgatgctgatggaattcagagtcttctttcattgtttcttccatttctcccccaactgctttatgtcaggcattatgaacttaactgcgagtcaagagaacccctggctccacgctgtaaacagtaactgtactgttttctcacttaatgatccctgaagtggagcagtttcggcgtggttattttgtggctcaatgacatcctcaaggaccagggtagctttgatctttcttctctgcagcccccgagctgtcagttttgtcttgactgactcctttgtggtcacaacatggccgctggggtccttgctgtcacatgcatatgtaatgggatttagcagctgaggaggacccatgccttcctctacgtttctttctttttagtagatggaaaccttttccagaaacccttcaggagacttgctctcatttcagatcatcagagaaagccatgtggtcatttctagggctgtcaccggtgaggacttggatgcctatggctggattagtgaagcacagcagatccacagaacagagcagagcagagcggattaaaaaaacaaaaaagagggctctgttacaaaggaggaagggaggaggggtgaggccgaataactggaaatattactacacatttaaaaaatatttttgttaaagacaatctcaaacacgaaagaaagtgacagccgagttccactttcttccccggttcctgcagttctcagactcttaccagggttaagtcttcactagtcacccctttgtctgctggactatttcaaacatctcagacacacatggatatttaatgatctaaatgtgcggaagccctcccttatacttgggcctggattcaagggaaaaggctgcttcgagagctagaggttgggaaggactaacaggcattaactattttttgctagagaaaagacaagattctaaccagatgtagtgacccacttctgggaaatcatagggaaagacctcgaattagaggccagcctgggctacagcgcagggaaacaagaataaaacaaaatgaaaccagagacaacatttctcagaggaaaaaacaatatccagaggaaggagttctccctgctgttgttgtggctgcatctggagtcttttgtacatggggaagcagctgtcctaggaagtttgagttgtggattgggggtaaggggtgggggtggtgctccgttctgcaggcaagtgcgagttcagcctcaggtttacagtttccactctctggctggggaggccgaatgctttctaagagtggggttgggtttgctgacacctgtttctgcatgctaatagatttctggggtaagatagagcggtgatgtcacctgcaggtgtgtgagcctgtggcggtttcccgaggcattgtagccacatctgtcctcagctgtgtgggtctttgctccagcaggctgcagaatgagctggttgcctgcagagcaaaagccagaggcagcaagccgcggtggccttgcttcaaacaagcggactttccccaaagcttcggctgattttcacttagttatggaacaaaacacaaatgttgtttctttaaaatgccacagcggcaatcagagtatatttccacgcacccttttctcagtttcctgaggccacctgccttgttacacgtttgaaagcttcctcttcctcttcctgaaacaggaagcttgccttcttattttcctccaggtttaaagtgtgcccttctttgaagagagttcacacacactctctgtggggttgcacctttgtttataacataaaaaaaaaaatctccatttctctacatgtgctctgtcttgtctctaaaggtcacacggcacagagctccctgctcagggtacatcaacctgggctgattttatctgtgtgcgctttgtaagatgtttgtatttgcataggacgtttagatacagggacactttgtataactatatttgaaaattgagagacagagagagagagagagagagagagagagagagagagagagattgctgtagcctgtgcccagtccagtggctagtgcagtaattacaccagtcccttagtatagcgttctcgagcatgtacaatgtagtgaaatgagtgctttttgtttgcacggtgtgcagttcagtgtggtgtgagaatccgcctgaccccaatacattttgtttgacatgcacagctggggcactggaggatagtccaggccattaaaaagaatgcgaaaagaaaacacacaccatctatttgtcaggacacaatgaaagggagacttactgggcctggatcacaccaggaggaaggagaagaggaaaacccacctggcccccagggagccggcaggggcacagctactgttgcctgctagagctcccctggtcatgcaaaccgatgcccttcccagctcccgggatcttcttgtagggtgctgtgcaatcagaatgctggggtggaagggaggaggtcttatttggacttggcattccaggggagcccaaggttaaggggttcatcaggcttatgtgacatctaggaatggcttctaaggtgtctgaccggtgaagacctgctacgcctcccgaggtaccccaggctttcaccaacaggcaggagagaaggcagtgatggatccttaggaagttggttcctccctctccccagccacacagatgctaccccatactcagctgcagtcccctcccactggcccctcccatcatctttcttttattccccatttgtttccttgcagggatctaggaggaagtggaaacaacaggccaagctgatgctataaatggttggctaaccttggttaggaaatagtaaggcacccaaaatgaaatgttgctaaaggagtacccaaggatcagtaacatactgaccagacttgtttaaaaactatggaagatgtgtacctttaacataaagtttagattgctggggaaatgtttcagctcatgtttggctcttcattgccaccaagtagaccaattcccatactgcaaagaaacacccctgtcccacagctgaccgttaggccctaccccataccaaagggcatgactacaatgttataaccctagacctagagcaatttttatggaggcttgtttcttttggagcactagacaaaactggacatatgctttgttattaaaggatgtcttccttatttttcctgagtgtgtgacatgagttgtcactgggattaggggatgtttctctgttacaatagtatcagtctcacacttcattctctgattctctgattctctctctctgtgtgtatgtgtgcgcgtgtgtatgcatattcacatgttcacgtgtgcagttacatctgaacagccatgctgcatagataggtctggagaaaggtccctggcaacctcacctgcattcagaagccaagacatctttgtattaccttagtcacctggaccttttcagagtgacagctctgagcctcaccttgactcagccctggctcactgtccctagtttcctcgatggctgtgtagagaagggcatcagtacgctcttatgccctgtaatggaccatggtagaaaaggtgtccaagaaactccctctctggcaaaagtaagaaaaatataccttgactgatgtggtttggcaagagtgacttaaaaatgaactccacaaaaaacccccacactaatgggagatggtgtgtccttgccctttgcggcagaagtttaaggtgccagtgtggttagctgaattctggaaggaacaaaaggggagattccctctggctgttttcatgactgtacttgttcaaaactcccatttccccccctcacctacattttgtttcttgacctggaacagagactctcagaaatctaaccttggctatattagtaaatggtaaacttttcagttcacactgaatagttgataggaatttcaaaacacggttaaatgccttctttgtgaagacagcaggagctcccttctcatctctctgatgtcactaatccagcatttgcaccttactgtcactacgtaatgtctgggcagctcagaaggatttccaggtagtggatctgagcacatctctctctctctctgagccattcatccatggtgtttatgcagcaggaatttctcacttctcttcaccttgctgtgcattgtctttctgccagggcatctgaaccactctgcgtgacccccacagaaatgtcagtgcatgagactcggggagctcttgtgaatattgtgatgacagatggctcaggcataaaaggcatcaccacaggctttgtgagaggagggcttgtgcgcttgagatcnnnnnnnnnnnnnnnnnnnnnnnnnnnnnaactccatccaccccccccccccagatctgcaatggggccattcagcatgagaaggacactgaatgtcagaacctacctgcttctgacacagtcactcctggtccccacaagcttcatataacccagaggtctcagaccccctgttttctatttgacatcagaaaccaccatatatggtgccaactgtttcctccatcacagaatgcagcgagtacccggtggacaagacaggaggatgagggacaggaagactaagtgggtttggtgctctttgcagagggctacttcttccttgtcatggccaagcatggtgaatatgaccctttctgtccttgccctcactcaaatatgacatcaaacacacagaggctggggctggctgtgtagggaacttctttctgagcctccacgcccatgaccagagcccaggtcctgtaggtagctggtgttctcttcatcttatacaagctacccttgacttctcagcagatccctgactagaaatctctggggttgctagtgtcatgccaggcttctgttggagtctatgtgtttgctttctagattgttcatagaatgatctataaattatgtccttatttatagttggtgtcgtaaggaaacttcaaggttggcacttctcataaacacacagaatttcgtcttcctatagacttatacaccacttgggccactacagagatgtgatcaagacctcctctctttttggaaggttatcacctatactacagttgatgctaaaagttgttctgataaaacactggaggccagagaagtctactgagatgatcctgggtgggtgaacttagataagaaagggaaacggtttaatttcaagtgtcatctgaattttcagaccaccctattgtgaaggtgaacattggcttcctttaacacagtgtgaacaggacctgtccatgctgcacttggcagggctctggcctttagtccatctgcattcatccatcgggtttcatgtttccataaatagcagccagcaccccagttctggacccagacttgtgttcacctcccagggcaggcccgtgacacaaagccaccaaacactacccatttagcagaggctgtttctcctgtccaccccagagacttcattttttaaattcagaaggctttctggtttggtagggcgtccagcttttcttttttatatagtgtctaagttttgtttatcctctcacagcagagaccatgctgacaacagggcccctgttcacccctcctcagtcacacacaattcccaacattcatttagagaggcaaatatttgaataatttgaataagtaaatatcttaagcaattcccaaaacatgttgcttgctgataagtatttaatgtacttttaatgattacatgcatctgttttctctctttcaatacctgggctttaaggtctataacgtgatcagcatttatttcattttcagaaaagctcacccaccctgaacccccattgctgggcatgggcaggggtgggcatcccacgtcaccacaaaaccatcacagtatagggatttagggatggatgagatgtgtttcgggtcaagttccagcacctgaaacaagtggtgtgtgtgtgtgtgtgtgtgtgtgtgtgtgtgtaattgttgtttcctttgtttgagactctcattttagagccaaggcagacttagaattcacgatgtccatctgcctcagtctccaaaaactgagaccaatgcatgagccagcatgcccagttaggcaaatgattagctgtacagctatttagtttcttctaaaaatttaactttactaattctggtggtttaaatgaccctccatgggctcatatgtttgaatgtttggtccctagttggaaaactgtttaagaaggattgggtccttgttggaggaactgtatcactggagatagactttaaggtttaaaaagccattcccagttagctctctctctctctctctctctctctctctctctctctctctctctctctctctctctctgccttgtgcttgtggatcaagatgtaagctctcagcgacagctctacctgcagccatgatcccaccacaatggccatggactaactctctgcaactgtgagccctaaattaactactttcttttataagttgccttggtcatggtgtcttatctcagcagcagaaaaatagctgaaacactcatatgtttgtcaaaggattctttttgtggattaatttctgtaactcccacgaatgcacttagcagagtggtaacacaggaggtcaggactcatgttccataaatcttcacttcctttctttatccaaaatttacttacacatagcatcctgataagaaccaaactctcccttcctctcctttcatgatatccaggaaaatgtcagtgtaccgcagagtcctggggccaagatcctcacagggctccggtaaaagtcccccaatgtacttggctgtgtctgtcttgatagtagggacagaagttgttcgcatggactctagtgtgtatgagagccttacctccttcttctaccccagtatctggcttggtgactatctcaagtcttggctataggagcaggacaggagagcaatgatctcatttgaacttaagttccttttgcagtttgcttatggggaagaaattacatattcagattgtaatggaacttggaggaagtttttagtatctgggggaaaaccatgacagaaggtgccatttaaaacgcatgaataatgtacaagtgaaaagaaattcatagttacaggagcaaacctgtctattggagagaattgccatgggaaccgaagatgccagccccatagctttccttcagcaaatgaacttaatgctccagctaaatttagagtgccttctgcatggagtgcactgcagtgggctttgtcctctatttcagaaggcttctattttgtcatcagagtgaacatctggggacattttaattgctgttttgcattgcactctatagaatcttccagcattccatgcatttaccagccggctgcacacattgcctcatggatgtctgcacatccaggatgagatgcagccagtgctagtggtagcagcggggctcttctgactgtggggaaaagttaagagtaaaattcactgcctcaattggctttttaaaagcggttttattgagatataatgcacatacatgaaattgcctgtttagcacatagagtggttgttggtatcctcaacaagttgtgtaacaacttttgtcaattcttctaatgactaatgacccatagtcatctctactaaccatccttccttaacttaggcaaaaattaatctttctgtctttatagatttgcctgttttgttcttctcattttgataaaatcgcattaccaggtcttttgtactggtggtgttcatctgccacactgctctccagacatggtgtagcatgtatggactgcacctatcttccttttcatgtccaaataatattcctgtgcatagatataccgcatcttattgatcgatccgttcactagttgatgggtgttgggttgctgctactttatagctctggtcaatatgttcctagcaacaaaaatgtacaagttttcatgaagatgtgcatttgatcttccttgtaactaagttgctaggttgtactgtaactgtgttcacattttgagctactccttaaacaagtggctcagtctgaaccccctgagatactgattctctagttagtgagctgttggaatcctttcacagtgctcacagaactatgtgctctgaaacatagaattattaatttttgtgagtccacttttttcttttggtgccatatctaagaagctgctgcatcctcccaagaccctgcatcttttgtctgctttctcctgtgagatattttagctcctaggtttaggcaaatgatccattttaagttgacttttgtatatggtgtggggaaagtaccagctttcattcttttgcatgtggatattcaccgggaactaaagaatggttctggggaaactgaatctgcacatgaggatggatgaaacgagatctgtatccctcactctggacaaaaaccagttccaaatggacaaacctttaatgtaagacctggagcctgctagaagacagtgtaaggaaaacacaccacagcataagtgcatctgccccaggaactttattgcttttagtctttcagtatttgtttgttttggtaccatttttgaatactcagtagtcctaagtgtaaagattggcttttggtggcgttggtggcttttggtggggctgcagagatgactcggtgactgaggctgtttgctgctcttgcagagaagacttgagttcagttccaagcacccatgtcagacagctcacaaacgcccgtgccatcagctccaggggatccagcatcctcttctggccttcaagggcactgcactcagatgtacatacacagacacacaaatattgatgtcttttaaagaagagtgactacttttggaatctcatatctctttagctgatttacgtcaattacagcatacttcctcttgatcactggaactgtgtaacaagtttctggattgggaaatgtgagttttcaaaatcattttttctttctttcaatattggttggctcttctagctctcttctgctccaggtgaactttaggagcttttcatggagtttgaaaaatagacacaagataccttttacatgttttctgtcatttgtggatattagcttcgaaccacataactgaagcagtaatatatacaaaaacacaagagaataaatgagcctgagtcagtcctccatgtctactgtttgttattccatttggtcttgtctattaaggatgcttccctgatgtgtttccatttgaccaactgactcgttctgtcagtgctctttcagaccgtccttccttttaggttgtgagtgtgtcctaatactgctggtttttcctcccactgcgttagcgttcttgtctggtcccgattttcttacttatttggttgctcatttgagacctggatctggtcagcagtctcattggaaatggagcactgaactctctctggcattgctttcgtttgactgtttggcttccagtatagaagagttgtgtgttcctgcatgtgttacaatgccttattcttttgtatttctgtgtttctttgttgtgttgtgtgcatctatagagacagataaggcttctggtttttaattgtttgttccctttccacattcattttgtttgtttgtttgtccttttttatttgcttaggttctccctgccccaccccaggattatttaaggaaaactcttactgctgcaacagatagaatggtctgatagcaattccaggcattgggttcctcttctgcatgcttttctcctttctagggccaggctactaaaggtttgaccctaagcttatgtttccacttgtgctgaaagacagaccttccctcttaatctaaatgtcattgtaaacttataagccacatccccagtgccattcgctataagaaaaaccagcaattgcttcatttggggggttattactgcaaacagattttaacttgagctctttattttgaacaggttttttttttttttttgtgtgtgtgtgcttctgttttttgcttttcgctgaatttttagtgaaaaaattaacacatctataaagtttataattaaattccgggttttctgacgactttaaagtgctactgaatatttcataataaattagtcatcagtttttaagaacacgtgtttcttttctttctctctttaatatatgctcattgtaaatactgacaggttttataaagacagtttcctcacacaaaggcctttcctctcacccactttctcatggtttgccccgcttttctttgggctttcacacccccacccccacccctgggatccatatgtgagaggacagatgtgatacctgcctacatctggcatattctaatcaatatgatattttttacttgtattcatcttctagaaagtgacacttccattcttcatggctgagtaaaactacattgtaggcatgcaccatactttctgtgttgcctcatctgctgatggatacctactgagttaatgtgaataagtggggcagtaaatacagattagtgagcctctgtggtatgacgagccagggcacgtttgctgtacaccaggagtagtgtcatctgatagttccagttgtactgttttaagaagacatgatacttacatccataatgacgttcttaccagcagtgtacaagtgttcctctttctctgaatccttgccagtgtttattgttgttcaatctcttcttaaaaatgtgtgtgtgtgtgtgtgtgtgtgtgtgtgtgtgtgtgcacacctgcctgcttatctgtatgtgtatcacatgctgcactgnnnnnnnnnnnnnnnnnnnnnnnnnnnnnnnnnnnnnnnnnnnnnnnnnnnnnccaaccctagttgttcattttctcagtgtcagtcattctaagatgggatgaaatcttagtgtagttttaatttgcatttccttaacagttaagggtactgaacgtattttcgtggctcaccatttgtgtttaactttgtgagaattgtcttttatttccctaacccacacagttatttggttgtctgctttttccatatttaattttctgagtcccttatatagtctagatattaatctcatgtcagatgtatagctggcagtttttctccattgtgtaagctgtgtcttaggtctgatgactgtctccgttttcatgcagtagcttttaaagctagtgtgatatttcttgtcaattcttggtcttttgtcctgagctgtagtagtacttgtattattttcaaaaattaattaaaaatattcatgtgtatgagtattttggcttcagatgtatatctgtacccacacgtgtaccatgcctgggatggccagaggagggcactagagcctttggaactagagtcacagacagtttaatccaccatgtgggtgctgggaactgagttccgatgctttcaacagctgagcaaactctccagtccttgaagaattttctccatggtagtctctgacagtttcgaatatgagatctttgacccatgttgagttcatgtgcgcgggatgagagaagggcgtggttttatcctcttcatgctgatggcgagctgactcagagctgtttgcttgaggttttcgtttttctgatgcacatttttggcttctttgtcaaagttacatgagcatattgcgaggctggtcatgactattctattctagtccagtccattctactgactcatgcatgtgtagcgtgctggtttataactaagactctagtacagtttggagacaggtgttttaccagacagggtttggtacctccagcattattctttttcgttcatgactatgttttctttgaatgccttttattgtgaatgagctgcttgcctgacttttttttccccacaggaaagtttctgatttcagttgattttgtatcttttttcttgggccttggacatctgtgatgatgtcattgcttgtgtgtgtgtgtgtgttttttaattatctattttcttttcaaatcaaatgtttcaatgttcaagtggggcaaggtcacaatagggttgaggttttgttccttccccacttggtgagtgcatctccatggttaaaccttaatttcacattcttggtacacaagttctgatctccagcaccactccaagagtaaaatactaacttcagaagcaaccataactgatagataggtctaccttaaaagcacagccacagtcaattaaaaaccatagtccccttgactccagttgttttgttggtctaaaggagcaaagaccagcgtggtcgtttgctaagttagtagatattaaagttaatatggaaacagaaccatgtgagaccaacagttaacatgagagcaacagaaagaaaatagaaaaagatgaggtaacttgaaggagtgtaaaaaaagaagggaggacaccaggtagtgccagctaaagtcttgatgacaggagagatacgtgaagaattgggatcagacaactcaaacaaccccagcccttgggaagccaagcctgggagatgccagtccaggcctacatgtttggagagagcaggacagagcactgtatgaaacgaaagtggtacctctctgtctgtgtccatgcacctgctcagctgaaggcaggccccatgctgtatgtggcctgaatacaggtggagcctatgtctgtggccacttgtgtgtgttcagggcagaccttctctatgagatcgcttgcatgtgtgcccagtgcagtgtctccatgttgtcacacatgtgtgtccagttgcagatagtaggcagtcactcacgtgtgcccaggtggaggtgcctctatgcagttactccttgtgtgcaggtgcagactgtggttatgtgggttcatgccttaacacaggtgcatctgtaccagcactagcctggtacaggtgcaggtgcaggtgcaggtgcaggtgcaggtgcaggtgcaggtgcaggtgcagtgcagtgcaggtgcaatgtctctatgccatcttgcctttccttccctggccatttgagctgatgtgctctgaaaagagcagagtccttgtggtattaagcttcctgtgctgatttttgtgttctgtttactccataactaaaggaggtagtttgcaggagtaggttgtggggactataacagggtctctcaatctccaggcactgaaaagggcttttggcaagctccccacgggcatgtgctcaaatgcctttaagcagttgtcactcatccctcttctggggaactaggaagtcttgctccagcctatggctcagaccaggctgcaaccttgtggcatacggcacaatcctaattcaaaggtttccctttcggggtctggcaagatggctcagcaggtaagagcactgactgctcttccaaaggtcctgagttcaaatcccagcaaccacatggtggctcacaaccatccgtaatgagatctgacaccctcttctggtacctctgaagtcagctacagtgtacctatgtataataataagtaaatctttgggctggagcaagcagaggtcctaaaattcaattcccaacaaccacatgaaagctcacaactatctgtacagctacagtatactcacaaacataaaataaataaataaatcttttttggaaaggttttcctttctagctagtggtaatatgcactccaggagtcctcttcttccccaagtcccagagaggctgtatatggaagaaccttacctctagagtggcctaactacctactgagctggggccaattcaaactggcttctagcagctgctcgggtgaaatgctagaaaaagaggaatttctatcccctgtatgttatgcagacccctggattcttgtggttggactgcagatctgatgtgtccaacaatggttctgcttttagactctctgatttgtttttcctttggactctgtcccacttctgctagctaccatgtctttctctctctctgtctctctctctctctgtctctccctcttcctcttcctctccctccctctccccgcttcctcctccctccttctctgccttcctccccccccccactctcctcttccatcccaccctgtaaattctctgcattgattagggtgcaggctttctgagactcttctctcttagggagcttcaggctccattccctctcttgctgctttaggatgggtccccggaagagccgggcccttggggaaggacgctggtcgctttctcctgttctaactagttttgtttttattcgctcactgaaactggtgttggtttgccatcagaggcctctcagggcagctgttcacaaacaattcctcatgtatcccctagagacggaaaacatgaatgttggcatatccatgtgtgtagtgtgtattaccatcttctagtccattaaatttatttttatgtattttatcctggctgaggacattatggataaaaatattttcttaacttgatttctaaattgtccgcagaacacacctaggggtacatggatttctgtgtggagatatcatagcatgtaattttctatcagtaagactgcatcataggcaaataaagacaatgctctaaatacccgaatggtcttctgtgttgtctggtactaggacagacccactccagcccccagagctgctacttgctacatttctaccatttttgctgccagtgtgttgctttgaatagaaacagtgtctctcttatcaagcttgtagtccaaccttccttttaaatccagtatgatgatccttgcttttttatggatggctaacaatccttcgagctcctcctgcctctgccttcctaatgttgcagatgagggtgcacactcccataccagtcttagctcatgtattctttattcttctagttctttttgttttcttttgtattaagtaaatattttctagtatagtatttatgcctttaaataatttaaaactgcactttccttattgtgtgtatgtgcacaggcatgcatgctgaggggcacacgaggagatcagaggataacttgtgggagttagttctttccttctgccatgtagttccaaagataaaactctgatcatcaggtttagaggcaagtgcgctaacccacggagccatctctctgtctatctttttattaattaacaaaaaacttctcattggttctttatgaatttcacatcatgcaccccaatcccactcatctccccctccctttgtatctgccctcctcccacaaaataaaaacaaacaaaaacaaaataaaaaataaacaaaaaaaatctcatcttgaaagatgcagagtgtcacagtgtcacacagtacacccttctgtccacatgtcttttcttgcaaatattcattgtaatgaacactgtctggtttaaggcctctggcttatgcaatactgtcagtactggatcctcactgggatacctctctgataacctgttgctgctctgtgtcatggagatcctgcagctttggatctataggattaactgcttcatgtactccatcagttcatagatgaggtagatgttgaggtaggccaaaccaaagctctggatctgggcctgggtggcagctgagttggtcagcctgccagttctcctgcatttttacccccaagaccagctctccagcactgccccagctagctacccaatgccacagcctgtaaaggacagggccagctctcctactttcatgacctcagagccagctcacctgcacccaggccaccaaagcctgtgctgtgagtgctgtgctctgagtgctgtagccgggtggggccagctctcccactctcatgatcctgaggtcagcttccccttgccactctccctgcctcactcctcactgcctctggcaggtggaagagctggccctacctgggtgtagcactcacaggaagtctggcgttaggagctaattaatttttatatagttctttgcccacctctcctttaggaatgttttcttttattggtagattgaatagatttttcatataatatattctgattctgatttcctccccaccatttctcttttctgttatactattttgcatatgccacatctacagaagttacacatagtaatacacagcatactattgctttatacaattttcacaacttctgtgaaagagaataacaaacctgcatttatatggtttgttacaatacccttcttttttattacttttattttttgagattataatataattacatcatcttccctttctcttttctcctaccaaaatctcccgtatagtcctccctgctctttttcaagtctatggcctctttttttctttaattgttgttgcattcatatatgtataattcacttatattcctaaacacacaagtgcaacctgttcagcctgtataatgccactgtgtgtatgttttcagggctgaccattcagttattggataatagatttaactgattggtttctcccactctcagcattgcgtagttacctgtagttctttgtgttgggttgaggccttgttccccttcatgttagcatgtctaatgtcgttgtccttgttcacctcatatttatgtgagacttaaattaaattttaaaaagttggtgagacttgggtgtagcttctggcattactaggagaatatctcacagaaaactccctgatcctggtttcttgcgatcttcccccttttctgcagtgctccttgagcctttggtgggagtccaacacccttcccagtcagaatacctgttttggtttgttttttttccgatttgttctgtgggtcagcattacaagctggtggatttctttattctaaaatgctttcttccaagtttattttttggcacagttattgtgaaatatattacatttgtatatgttatagcatccattatataattattctcatatgactatttgactgatttttccatcagttaaaagaggaagcacagggctggagagatggctcaaaaattaatgacacatgttgtctttacagaggacccaggttggatacctagcactgacatagagctcataactatctgtaattccaattttaggagatttgacaccttctcctatcttctttaggcacaaggcatgaacatacatacatgcatagagcgcccataagtacccgcagaccaaacacttaacacataaaacaaaaatccatttaaaatattgtaaaaagaagcataccattatcttgtccttgtgtactgacaagacacatctccttgggtatgttcctcttctgtttcaactcaaggaacttcagttcatagttcttttttttttttttttaagatttattttattatgtatatgagcattctgttgctgtcgtcattctggcactccagaagagggcatcagatcccattacagatggttgtaagccaccatgtggttgctgggatttgaactcaggacctctggaagagcagtcagtgttcttaacctctgagccatctccagccccagttcatagttcttatgctgttagttttgagtagctattctgttttgttcatctgtgaaaaccagtgtttcatcttaatttctgagagacagctctgtgggctgtaatattgatgtttgatccatgccttcctcccaacagctgtgttgagctgtgttgggcctccattgtttctaacgataactggcttgttaatttgttggtattcccttacatactgtggctttcttttcaccacttccactcaaatgtggtgatggtttttcaaaagatctggtaaatatttaaccattaggtttaaaaaaaaactttgaagatagtttttattatatttattcagtatgtatgtgtgtacatgtgcatgtgtgtgtgcccacatgcaccttggggctcatgttagggtgatgtagagtcagaggccaactgggaggagttaattctcttcttcctctgtacagtcctggggatggtgcagcaatggtcaggcttggcgacaggagcagatgctcatggggcatctccccaccctagtcttttgcttcctgtcacctgtcccttccttggtgcccatgcagggggatatgctcatgggcctcatactgctttgagcctttgcatacctttaaccattattttttctgttttttttaatgctgtctcctatttattgatttatgtttcaaaattttatagtttctcccagcaattcaaatttataattgagctaatctcatgaaaaaaaatttcatttgtttttcaacctcagactctcaattttaaagcaattctgtgcctttattgatactaaatattgctatccaatatttaaaacttttaatgcggattatgttatttaaaaatatacttgtaatgattgatttagatttttgtttcctaagtacaacattcatacttccttagaggcaaattgggggcttgctttgttcccactttgagtggctcacacttaaatgtcttataactagttttctttgaaaactgcatgttttgggtaatatcttcagaccctgtgggtgctcgtcttctctcttgagtttcctgttgtttatctattaatgtagctcctgctgtccccctgtagtaccctgtaatgtcagagcagattcagccttgagcatgtgactgttcgtggattgcccgggatgactgctttttaccatgctgtgcttagctctttatacgtttttaggtagcttgcttctattagtaggcagtgtattggctgttagggtccattatcatacgctagttgctgtaggattttagcactccttggagcctagtcccagtctgcttagtgatgtcctttggaagggccaggatagtgctaatctgtgaggctgttcaggccacagaaactcatgttagatctttccacgattctttctataaagcttttatccaacatactgtttagtttcaatacattcttattttttgccactaaagggattgtgaagttatcagaaactcttaattgtacttacatgattttcttactgtaaccctgtaactcatctgcatggtctttcacatgctctgaaccaattgaaattcctctcctgagccagaagctcctgctgatatggcctacctttcttcaggttcaagcttgacaccgttgtaacacagctgggtgctttcttcctctgaagtgactcctttacaagcaagagtagggggagatcatagctcctagtctctgctctctttcctagtgtgaagtgagctggggcgggatgctcagggctaggtgctcttgacttgctgtgactaaactgaagcttctgctgtatgagagaggacttattggaggaagagagtcccaagttctcttgcttgtcactgtctaatagtgtttctatactatttagatatagcgaggaaaatagatgccagtgtcttgcttctactgatgtaaagtcattgtcacagaccaggggttgtcggagagtcctactggaccacaccttcctagagtagagcttccagtacattgaaccactggtgggggaaaaagcctacatgaatatatcatttctccaacattggactgtcactttcccccctgaaatttagatactattcaatagctgtttcttatgtttgtcataaaatagttcccaaaggtcttatgtagtgttgtagggaccattttcatcaactaaatagtaaatgctttggcgttagtaccattgcatgtaggccagcaaaagtggagtccatccaaaggtgaaaatcgtattttcttttgagaaaagtcttgaagcatgtggctgtcttggtccagactgtgacctaggtgaacaaggacttcctagctcttggcaggaattctgtggttcagcctccactagcctttcagaatctttttgaaatgcatccacccaggctgtcaccttgagttttgttctttggcatcccatgacttacataatttccagcaccctaagatcttacacataaactcaagcgaccttgtaggattttatttccaggctgtattcctgtgaagcagatggattgattttgtcacaggcataatacattgttaattttggaaatggtttttgtaaagaaaacaagctgggttattttctttttaattttcaattatgtgcaaggatatgtcatcagtataaagaaatcaaatgggcttttcacaactcagaaggcagtgttgtccctctgggatggctgacttagggttttattgttgtaaaaagacactgtgaccaaggcaagtcttataaaggacaacatttaattggggctggcttacaattacagaggttcaattccttatcatcatggcagaaagtatggcagcatccaggctgaagaaggagctgagagttctacatcttgatccaaaagaaaccaaggggaaaactgtcctcaggcaactaagaggaggatctcaaagcccactcccaccatgacacagttcctccaacaaggccatacctcctaatagtgccactccctgtgccaagcatattcaaaccaccacaatggcccaggaaggaactggagtcagaaaagggataggcagacaaagcatggtagtgaaatgtgggaagaaatggacaaccatctcatagtgaaattctggaacatgttcagatgtatcagacactggagatatccacctgtgcttgagggtggaaagctagtggtgggtacttgggccaaatccagcagagggtacttttcattggcgtgttctagacttaacaacagagatgttcaaccaacacctgacacccacaccttgaacatcactgaggccagcaactgggtaaccagcaagttttaaaggatttggttttattgagagggatggttattgcaatagagagtcagttaaagaaaaaggaaatttcccaaagagaagtattccccgaagctttatattctgttgtcaatagtccagtaaggttgctttcacttattatttcaaccgtagaatcaaaaatgaaaagggattctgggaataagttgtgtcgatggaggctcatggctcataattagtgattaacgtgggagagaggttaaagcaaggacttgtctgctaaagcaatgggaaggaagaccagggacttgtcagaaccagaggacagctattttaagcatcagaaacaagagtccattcaccttcatagattcttcttgggttagccagtggcattttatgtggacaactaggttggtcgattaaatgcatcccactggggtaaacctattatttctcacctctgttcatctataaaagctaaaccaagccacaaaatagcacagataaaggcaaaacttggtccatattcttatagacttgtaagttgtcctgacagaaaaaaatatgtcaaagcaaagaatgttagattaaattaattgtataaaagtacagattttaaacagggtgttatggtatgcggctttaatctcagcactcagaaggaagaggtgggggaatctctgtgagttggagtccagcctggtctgtgtaatgagttctaagacagccagagcttcatagtgagatcctgtctcagagagagacagagaaagagagagagagacacagagagagagagacatacacacacagagacagagagacatacacacagagacagagagacagagagacacagagagagagacagagagggaaggagtgatggagggagggagctatggagggagggagaggggaggagagggaggagagggagaggggagacaaagaggagaaagggagagggaagaaaaaagttcagatttaaaaataccaattttaatatatagaaagcttcagtaaataattattaaatgatactaatatataaagacaaatggtacttaaaattagagatatgtaaacatttaaatttaaaggagnnnnnnnnnnnnnnnnnnnntctgtgtaaatgagttctaagacagccagagcttcatagtgagatcctgtctcagagagagacagagaaagagagagagagtcagagagagaaagagacatacacacacagagacagagagacagagagggaaggagtgatggagggagggagaagggaggagagggagaggggagacaaagaggagaaagggagagggaagaaaaaagttcagatttaaaaataccaattttaatatatagaaagcttcagtaaataattattaaatgatactaatatataaagacaaatggtacttaaaattagagatatgtaaacatttaaatttaaaggagatccatatatatatatatatatatgtgtgtgtgtgtgtgtgtgtgtgtatgtgtatcttttttccttgaaaatttactgaaagtatagctttaaatatattcaatgacatagggaattcataggtaataacattttaggtgaaaagaaagcacacacagaactctcatgatgtattcataactggttatgttagcatatgtgggggatttcatcactctttaattggctttttctgacactgagatgttcccagtttcacacagacctccctgtatgttttatcactaatgtgttatattaacttgatggtgcgtgtttaggctatgatgcatctttcacagaagaggatgcatgccttactgcttctgtgtgacaccagtgctcactctttccctccatgtgtccttcttgagtcacaggaaaggcaaacagacccagcgccaccagtctccatacttccagcagacttcctaaaagtctaatctttatgtcgtgggtagagtcttgagctaggagttacaccttcaggaagataaactaaacgtgcctttccatggaggacagcagtggaatctggacattacacatgtaatctaaaaagagtgaagaaggcaaataaacggtcagaggatgacactggggggagttcctgcttctctctttattatacatgtctcagagtagttacagggggagctgatggcccagaaataccaatggacaaacacaggcatgtgtacacacatacacagacacacacagaatcatacacactctcacattaacacacacacctctcacagatcacacaggcacatgcacatacacaaacttatacacacactctcaaacatacattcaaacatacacacaccttgaagcctgtctttttttttttttaatgaaagggaaaatcaagagacacttatcaagacagaaaagttttagataatatcctgcatattctaatgccacataaagaaccaaaacatcatccctacttcatgctaacaaagggtaaggccagcagggtgtggtggtgcacgcctttaatcccagcacttgggaggcagaggcaggtggatttctgagttcgaggccagcctggtctacaaagtgagttccaggacagtcagggctatacagagagaccctgtctcaaaaacaaaacaaaacaaaacaaaacaaaaaaaaacaaaaaaaaaaaaaacaaagggtaaggcctctgccttctatgtctatgatgaagtttctgaagtctgtcgccaggctgagtctatctcttgtgtaattagaatactgtgggagaactagacatgtacctatacctagcagctccttctatatcctgctatgagggtatcagagacctgctagtaactgtcagtctcaccagcagagatgacactctccccactactgggctgctggtgattatatgagaggctagaactcttgcccttgcccaaagggagagagaacctgacgcatgcatgactagagaatcagtggaggccgcacacatgttggctttctacttctgtttgccagtaatgatacatttctaggctacaacaggccagaaaaatccagaattttagtaagaccagagactctaatgtagccttaaaatgtatgtattccagttgaaaattacccgttacactgtgaaccaggaaaatctcagagtggaaaaagaacccggcagtccttggactatagacacatgcactacatgaagctgttacccaggtgtgggagatccgaactcaggtcccattcttgtatagcaagcacttgccccactgagttattccccagctctgagatagctcaatgggtaaaggcacttcctgctacgcctgacagccagagttggatcctcaggaccctcgtggtggaaagagacaaactgagttcccacaagttgtcctttgacatccacaggcatgcagcataggacctcctcacagagaagcagaaaagtcatttacactttcaatataagtcccatgggtgtccttgaaaacacacaatgagaaccgaggaaaacatcagtgatctggacgagaactcagagaacagactagcagagaggacagagcttggcagccgaggaactgcagctatgtgtgtccttgaattccagacagaaaggaggaatagaacgggggtggggtggggtgggagcatgagaatgtagttgggataaagaaaaatgatccctgcaaaaagacataacttacagattcgaaaagttgagcagatcagtaaggagcgaaccagagaaatccacagaaaacactgaaaaccaagacaaattcttgaaagcagcagagagaaacaatcacagcagatttctcatcagaagctgatgaaggtcacaggaagtggcttgccatttctcaaccattaaagaaccattaaaccagacttctgggtgcagcaagatgacatttcagtacctctcagatgaaataaaactgaacgtctgtttcactcacagactaaaatgatagctgagtaaatttcctgcaggacatgattgtacacatctgtaatcctagtagtcagggaagctgagtcaggaggattcatcacaagttcaaggctagcctgggctacacagtgaaacaatttaaaaggagagaaagaaaaaggacagagcgaagaaaggaaggaaggaagggagagaggaaaggagggagggagggagggagggagnnnnnnnnnnnnnnnnnnnncttataattccagctgccaggaactgacatcttctagcctatgaggacattgctctaatatgcataaccaagacacacacacacacacacacatacacacacacacactaataaaataaaatctttttaaaaaggagatgaaaatggaaaaaagagaaacttcccttaaataaaaagggaaataataaaagaagaaattctggaagagtaggaaagaagaaaccacattgtaagtgagaatatagatacattcccctcctcttgaattctctaagttacatgggacagctggggcacaagggttatgacacggtacatgtggcttcaaatgaacttacagatgttactcaggaccgtcgcacacaggaggggatggtggatggtaagagaggcaaggtttctgtactgcacttgtcttggtaaaaggatggcacaggtcagttttgtatgaatatgaataaactgtatgcataaaaccttagtgtaattctaaaatagtatcctgtagcaatgtgctcatggataccataatatattaaaatgaaacctgaaggaaggcaataaagataaaccccagaaatttaaaatataattaaaaaaaaaacaaacattaaccctagtttcattattataaggaatgtaaaaagcataattcagtaaaaaaaaaaaaagtataacatgtcagggaccaaaacccatcaaactctatgctgtctgctcatttacatatgacattttatttgtattttacacatcatagcttacacagagattaatgaaagagagcaggagtggctatgttaatttcacataaagttggctgagaacaagatgttcaccacagatagagacattcacctcaagaggtgccagtgcatgagggaagcagagcagcactgtgtacatgtatgaagtgcaagagtgtgtgaagaccagctagacctgagaagaaaatgagaccaacccacagcttcagttaggaaacagcaacatccatttctgacaactggtagacccactgcaccggatgccatggaagatgcagaaaagccagcagtggcaacagccagccacagccaatccaaatcaaaagaactctgctcaacagacacacagggcacactcgtttcagacacctgcctacactttttagacactgtcctgtgcctcagaaggaatagcaacatttttaaaaattgaagtcctgtcaggcattagtggctgatatctgtcatcccagcactcaggagtctgacttcacagattcaaactaagagtggataagatggaaatttccacttgcaaaataaataacacacacctgaataacccataatacaagaggaactcagaagcaaaatttaaaaaatatgaagctatcacatcaaattttgtgcaatataattacagagtactaagagggaaattactgacaccaaatgtgcatatatgtatccactttttcttctttatgtgactaattcatggcatatgtatcatatatctaaatattgtatttatacatatatacatatatatacaaatatatatacatatatataagtacatatatgtatgtatatatatgataagttcctatcttaagatcctataaaaagaacagagtagactaaaagaaggataataatgataagagggtaaatcactgggcctgagaaacagaactatagaaaatacaaaagaacaaagagctgttttttttaaataataaaaatccacaaatccctggcaaactgttgaacagaaagaaaacatacattactgatatcagaaacaatctgtgggttatttccactccgtgaaatgagccagttcctccagagcctcaaatgcagcaacttccccactgtgtacggaactcggaagagccctgtagccagtcataggcagtaatgaagttgaatttaaagactcctgaagacgtcaaacatgatggtgcatgcctggattccatgcttgggaggcagaggcaagagagtcaggactgcaaggccagctttggatacatagacaatccggggccagcctatgctatatgagatcctgtatcaaaaaaaaaaaaaaagtaaagaaaaattatgaaccatttccagcctaaatgatcacactgctctattaagcatttaaagaagaattaacaacaattgtacacaactccttgataaagaaaagtagaagaaacacatttcagttcttatatagaaaccattatactttggttttccaactagaaagagacaacacaatagaaagaaatcattcagcatatcactcaggaacgcagacacagaatctcccaaaacctaagtattagactttggcagaatgacaaccactcattgtgaccaagtgggcttaattacagggacctgagcttgcttaatattaaaacaaatcaatataacttatcatattagtcacataaagaagaaaatttggacgcatcttaacgattaaaaactctcgttagcattgagcttgacagcacagacctgcaatcctagctccttgggaagctgaggttggaggaccataaattcaaggctttctcaggctacagaaggggttcaagtctcagctataatttgtggctcccaattgattatcaggtaacataaggagatcctgactcaaatacaaaatttaaaatgtgttgggcatatagcccagaggtagagtgcataccaagaatgtgtaaagcccaagattcagtccccagtaccacaaaacagaaaataatcagtgtctgagaacagagggtccagagatgactaggggagagagccctcgctgcgtctgcagaggatccagacacacaggcaacggaaggaaggaccatccagagactgccccacccggggatccatcccataatcagccaccaaacacagacactattgtatatgacagcaagattttgccgacaggaccctgatatagctgtctcctgtgaggctatgccagtgcctggcaaatacagaagtggatgctcacagtcatctattggatagaacacagggctcccaagggaggagctagagaaagtacccaaggaactaaaggggtctgcaactatatagatggaacaacaatatgaaccaaccagtacccccagagctcctgtctctagctgcatatgtagcagaagatggcctagttggccatcattgggaagagaggcccttggtattgggaagattatatgccctagtacaggggaatgccagggccaggaagcaggagtgtgtgggttggggagcagggcagagggagggtataggggacttttgggatagcatttgaaatgtaaatgaagaaaatatctaataaaaaattgtttaaaaagcactcacataaaataaaaataaattaaaaaaacagtaagagtagagatgattgtgactactttagtaaaaacaatctcaaataaataagtaagtaaataaataaataagagtgcagccaacatcataattagtgaaaggctctttctctaggagcaggtatggcaaggatttgtaaccgtattggtcccatttagcatggaagtagaagctgtgttcagttcagtagtaaagaaaacaaaatgacatgagcatacaaatgggacagcaagtaatgaaactgttgctgtaatcctacaacagggctgtgcagaaaatgctgaagtatcttcagagacaccaagacctaagatgccagttgggtgtgctcaaagacacagaagtctcgcataaagccctcctgtattccacacagttgtagcagatgtgagagtcttggggctaaaaggacgaactgtaatgttagtttgtcatatattgcttaattaagggcacattttgagaacggtgtgactgggcaattttatcactgttttaacattattcttgggggattgctgtcataaacagagatagttattggccaaaatgttgttatgtgtcatatgatcgaataattccattaaaacaaaagtactgggtacacatttaggaaaacatccgtgagacctatgttctggaaaaactgacgaaatgagaaaaagttctaagtccatagagagctggctcgtgtttatggattgaggggctgtggtattttaagaacctatggatgccttcgcctctgagatggattaagagtgaaggtggagatgccagctctcctttaattgtctcagggcattcacattgccaagattagtctaaggccggcactgagacaaggatgtgtgctgtaaagaggacttcgtgcttgtctatcacccagagttcagcctcagtgatgggtgcccagtgctggggctcagcatttgtctctgtcccatggtcaagttcagcctggcagggagaccagagtttgtggctggccattcaggatactgatgcatatactcactgctgcatctgcacctacctcaaatggagaagaaagaggaaagatggcctgactcccggagggaatctttattcctcacttgactggctgaggtgcttgcagtatccctgagatgctgtgatgggggaagtgtcctattgcaggagctcagattcagaccgctgtaacagtgaagctgttagcccaccccggcagtcttatctgtaaggctccacattttgcatcattgtagttttttttttcattcattaagatgcattaaaaaaaaatctcatagaagcctagtcctgatgcttaacattaaccaaatcttgtcaccataaaaaaaatgctaaggctctagttctgaaaacgtaaattaatttcccttgagtagtaactgactaggactcaggctcctttctaaggtcagctgattggctcagaaagaatctgctgcctctgtggctttgcccaccccaccctaccctcacactgtgttttgtccaccttctttcaacctggaattcagggggagaaatcagtggtgctccttgatatataaagggggatgccgacattagttctccatcacatggacacacacacacacacaccccttagcataccttctttctcaacaatttcattacctttaatttaacgttggaaagtagactttctcatttgccttaagggtctttttatagaatctttggtaagatcgaatagagaaaagagtaatttttgggggaattttacaatcactttcttagtcagtgctgagtagactaacagactatcttgaagactttggttggactgttaagagtatggtgatgacccctaagcattcctcactacctgccccaatgttttgggttctcaaatgaaagacacatgcacacaacctttatattttgatatgcctaaaacagctcaatggctggaccacttcctaacctccacttggggccaatcaacctccctctgatattccccaagttattacttactaaatcctatactccttctttgctgccctggacccagtcgggcagctcttttgggtcgctctcccctggtccctacatggcagctatgctctctgtccttctcaggcatagtgtctctcctctccttatgcttctcccagcatggctgatctcttccttcttcctctctctctctctcttgcccctgaatcctaaaagtcccacctctgtctgctctgcctagccattagctgtcagcatctttatttaccaatcaaatccaactgggggcagggtccctgtgtgtcttactgcagacactagtgtgagaagttagggggacccaaattaacatatgagtgcaagcagataccgttctcaaccttcctaatgctgagaccctttaatgtttctcttgtcatggttattcccaacattattatttcattgctacttcatagctgtaattttgctgctgttatggattgcaatgtaaatatctgatatgtgaccacaaaggggtcatgacctacaggtcgaggaccataaatctatttacagttgaggaaactgaggctcacaaatgcctgaacaagataacctacacacaggtggaagtgtctgcatctccgtgcaaaccaggtgtgcatggtcccaagccttagcttttaccgtcctatcttctgcctcctctgcagtggtataaattaggatgtgacggctaggtcccaggatagcttctcacaggcaacaagaggcaccagtacagaacaaaaacagattgagcagagaggaagccatgtttcttagtgtttgtttgttttaaagaagtttatttgaaccagatctattcttatttaaatatttgaaccctcaaagtagaacctggaagacttggccagtctcttatgcagagggagcctacttctggtccttgtcatcagatgttgatgttggtcagaaagaacttattcagtagaaatataggagcagcaatgtgggttcactgcctgtgtcttctctcaggcctgagttgtccaggtcacctattggctcaaagaaagaagtggcatgtttgtaatctaatcctgactctgcaggctacccatgttgttgctacattgttaattgtgatgaaagtggtcttcacagtctcagagagcagagtgttggttgctgcttgtggtggtttgaatatgcatgacctgaggagtggcattaggtgttgtagccttgttggaggaactgtgtaattgtggtggtgggctttgagaccctccactacatggaagatagtcatctgtttgccttagtaacgagatatagaagtctcagttcctccagctccatgcctgcctagatattgccatgctcctgccttgatgataatggactgaacctctgaacctgtaagccagctccaattaaatattgtccttataagagttgtcttggtcatggtgtctattcacagctatgggaaaccctaacaaagacattactagatactggccacaacttcatacctatgtgctgcctgttgggtagtcattccgagatttttgatctggcatggtctgtgagaaagggagatatggtgaatggtagtaaggctcttttccaaagagctgcacactagcaatgccatgtgggttccagcatctgtgtgtgtacgcttgggacactgtccttgtttgctgggtagactttctaacactgacatcaaagcaataagccagcatttctttctcatcaaatattcctatgtttaaaacttgttactgtcattaatctcccattggaagaagaactgggtgtatgagcaacattccttgaccttgagatgtgttggggtgtaaggtcattgtgcaagccggttcacaggcaagccgaagccagaaaggagatcaaaaccctcctctgtcactgtcaagaagtttagaagacacaaaagttatttgtagagtgtttataagagtaggaaaacattttggaagctttcttgggagcagatccatattttattacaaccaagacacccccccccgtgtgtgtgtgtgtgtgtgtgtgtgtgtgtgtgtgtgtgtgtgtgtgtgtgtgtgcaacacccattcatgtatatgtgtagacacaggtcatcactagatgtcatactctaaccctcttcacattattattactactaccactactactactactactaccaccatcaccactactattactactaatactgccactaccactacccctacctactactactactactactactactactactactactactactacttgaaccaagatctttcatgatgtacctggaacttgtcattttggctagactcctggatctgcctgtctcctccacaactcccagaggttatatttgttcagcttttacatgggtgaaatccaaactcaggtgctcatgcctgcaaagcaagcactttatccattgagctatctctttagtccaaggccactgtgaaagcaatgcttacctatggcatacacagacgtgcacatacatacttctttcacctgctgtacagaccgattgaaaattgcccacttgaagaatgacagctaaatcatggtggatctaacatgctaaatttgatgtctagtacaagattgctcagagtccaaaaagaaaaccattaggcattcagttttaaacgaaaaaagaaagttatgggaagcctgtctccattttgataccaggcatgatcctacggggaaagagatgtggtagagtgtggcagggcttggagctggagtgtttgatgcccacgcattagctgataatgagaagccgagttttctgtggttggacctcagtcttctaggtccagtcaatgcttacatagtatagccatgtccaaaatcttccacataaacaactacagaaaactaagcatggatgattagtagggatcatggttccaacccatcctggcaaggaaggcataaaggcctttattgtgggatgtgtagtagagtttcctcacgttcgtgatggagacagtactggaaccaggagctatctgtaatcttcatgtgtctacccttagtgacctgcttctgttcttaagggttccacggtctcttaaaatgatactgcgagctggagagcaaatgttgagacatgggctcctagggacttttagagtaacacagtgctatgatagtgggcttaaaatgttctgcgttgattccagggagatggctcagtgggtaaagtgtttgctatgcaggcacaaggatctgagttcagattcccagaagccacctttcgccaggcatggtggtatataggtggtatatatgtgtaactccagttctgggggcatagaattaggcagagcccaagggcttgtggctattcagcctgagcacagcacccagctctggttaagtgagaaaacttgtctcaaaacataagttgaaaacagaggacctgatgcctgcctctggcctctacatgcatacacatgggcaagcatacctatacatgtgtgctgcacacacgcatataccacatacaagtatgcatacacacatgcatgctttgttttataaaatatttgcactctaagtcttaaatctaggagtgttcccccaaaagaggagaaacagaaagggttggactgaaggctctctgagcggttgggctatctctgtgaagtcatatgggaatgggatgtatgtgtcccactgagggctctcacctgatcccttgactgtaacctgaaattgaattattaacaaatctcagtggacatgggagtgtgtctgggccccagcttctgtctgcagaggtcaagcacctcaaccctgaaggaggcaagtttctcttctcccttctggctgcagaaatgcctgtgaactacctagcaccctgagcttatactccaagatatctcagagtcaaggacagaggctcagccacataggattttctccttcagggtgactggatgtcattcacagcagactgatgcaatgatgcttcggagcaggaaacatgggaagcaattatctttttagtaggtcactggcctcctttgggagaagagaccagagggagagtagagaaggcaggcagtgtagtccccctcaagaggctgcgcctgcagaagctgccttggtgattaatagccgtgtcactttctgcgaatgttgcttcaagcggccgtgttcacaattgagtggggatgaaatacaacaaccaaaaataaatgtttcctctattccttagttgttgccagagcccagaaatagcgtttcagatctataatcttaaatggcatcattcgcagttctctctgagccctggattgattttcacgtggatatcagcgtgcatacatactcggctctttgtttttttttttttttaaagatcatgagaaagctaagtgacttggattctttttctttggagggagtgctgaaatgagaattgtttttatagagaaaaatataccctttacatgtatttttaacaaaaaatagtaacccagtggaggaaagacaggaagaatattgtgtccatatagatcatattctggaacaataaaaacgtctggcaggcagtaattgctggccagctgcagggattacagccctgtgagctgtgttcagggcagcatgccaggatgctggcaaccagggaaggagccttcagtgtgcccgactgggtccataaacatgatgctgagtgcagaatagccagtcaaggttgccatgtgggctatgacttctctgaccagtgtcttgatatcccctgtctctgctgcctctcttgcagccagacaacaagcttggggataatggtggcagtcttagggctgacctctggtagcatctctgagcacaaaagccattaatctttattgtcacatttcccacctctacagccagatagaacatcagacaggtcagaagccagtggaaactcccttttggtgctttgggactgtcagcatctgaggccagagggaaggagttgtggaccctgctttctgctcatccactgatttgggttttttttttttttctgttctcatagaagaaagtcagggtatggctgttggcatgataggaggtgggttcctctcttctcctctctcattcttctcattaatttctatcctaactgactacccatgttcccttgtcaaagttatttctctgtaacaactattaataagcagacattccagaaaaacaacacaaaacactagcatcagtcgggaggtagagggtgccagcagaaagcatggactaagcaggctaagcaggctaagcagattaggaatgactcgttggatgctttgggaggcttctgatattggcagggggctctccttggtctgacactaccttggtgtcacctggggtgacctgtgcagggtaacagtggcctacattgtgatagcctcgtgaaggaggtattggggcctctgaatttgttagcttgcatttggaagatgttgtcatggggacatcatttgctatctttaggaatgagctcaccctgggaggcggggcaaacactccaggatcagcaaggctccagtggagaagcatcaggagcagtcagttagtagagacacatgcagtgtcaggctgcaagggagagacattggcactggagggatcacaggaagattactgagggcattctagggagaagcaactttgcttttattggtttgtttctgtttgggttttggaagggatatgttagagagagggagaaatatcagaaaagtctcagttggggagggggatgtgtcttagttagggttttattgctgtgacaccatgaccatgcaactcttattaaaaaaaattaattgaggctggctgatagtttcagaggtttagtccattatcatggcaggaagcatggcagtgtgcaggcagacacggtgctagaggagctgagaattctgcatcttgatccacaggcagcagcaggatactgtcttccacactgagtgtagcttgagcataggaaatctcaaagcccactctcacaataacatacttccttcaaggcaagacctactccgacaaggccacacctcctaatagtgtcactccctatgagctaaccatgcaaacacatgagttgatggggaccttgccaatttgtcttagtttggctctttgtagagacaccatgaacacagcaacttgaataaaggcaaacatttaattggtgctggcctacagtttcagagatccagtccattattggcatggccggaaactcggcagcatgcgggcaggcatggtgctgcagggagctgagagttctacattttgatgtgaaggcagcagagagagactgtgagccacactgggcatagcttgagcataggagaccttaaagctcaccccaacagtgacacacttcctccaggaataccacacttactccaacaaggccatgcctcctaatagtacccactccctatgggcctatgggggccaattacatttaaagaaccacactattcaaactaccattccagcttctagcccccataagcttgtagccataacataatgcaaaatgcatttagtccatcttcaaaagttcccatagcctatcacagtctcaacaatgtttaaaactccaaagttcaaagcctcttctgagattcatgcaatctcttaactgtaatcctttaaaatcaaaattgcacactttaccagatcacatacttccaacatataatagcacaggatatacattactgtttcaaaagatatggaagagagcatagtagggaacttctggaccaaagcaagaccaaaaccagctggacaaactccagcctctgcatcagatctccaactcctttcagctttgttgacagcaacacatttctttttctcagtctggttccacgtcctgttaacaggtttccttggcaggtataccatggctctggcacttggggtcccaaaggcagcccagacttcacttttattgcttctcacaatggcctcttgaagggacacccctgccaatacatacacttggccctagtgactttcctcagtctgggggctggggacttctacaacccttttcttctatccttgactctaaagacagaaccacatggccgaagctgatgagctctgctttttgttggggctgcagcatggcccccttgttcaattacatcatcactaacttcctgtttttgatgctttccttttctgttaggctgaccttgatctcagagatgagcatgcctctgtatcctaggggctgagattaaatgtgtgtaccactagtcttctcctctgaagcctcttgagccaggctcctacagttcaaatgcacttaaagcattccactggcttgctaaaccaaaatcccccaatacacattcctccaaacaaaatcatggtcaggcctatcatagcaatactccggtccctggtaccaacttctgtcttcaggttttatggctgtgaacagacaccatgaccatggcaactattataaaagaaaatatttaattggggctggcttacagttttagagatttagtccattattatcatggtgggaagaatggcagcatccaggcagacgtggtgctggagaaagagctgaaatcttgttctgttggctgcagaaggggactgtctttcatactgggcataggtggcccctgcagtgacatacttctgccaaggcaagattttctccaacaagaccacacttcctagtagtgctactccctatggccaagcattcaaacacaggagtctatggggccatacctatttaaaccaccacagaatacgtggctgaaccaccacaagtgagtccagttagatatatggtagctgggcttggggctagtggaggcagtgagccctgcatggatggacagaggccctgggtgaggaaagtgtgtgaaacatcattgagaattcaagcaaagctcaagtggactcttggatgtcagaagcatttgagttaaattcccaatcatctggctactatattttaaatgcctatgtgtggctatgcatcacagactaatcaataggttaggaggtagtgataattacaaattaagtgctttcttttattagagtcatggcatctcttctcaggaatagaactttggctaagacaatggggctagaaaaccagtgcctcccaaggcatcagtaaactcagtgagtggcagattctggaggcttagtgtgaaaagatagctatgccctgagcaagggtttggtgggcataagccacagtatatcccagcatgagagtggatataagtgctttacaaggaagggtgggagggcatatatattcttgtgaaatctctcaagtttatgaaatcagccagcagtcctgaagtgaagtagctgacctccatgtcacatgataagatatactctgaaccctgccatgtggactcttggtggtctctctggcctgtaactattattatgattggacccagaaagggtcaaagaggaaatgggatcatcacaaattatgctcacattggggaaccgattatattagttttgttttctgttactgtgataaaacatcctgaaaaaaagaaaacaacttaaggaaggattttttttctcattaatgtatttgtttattcactttatatctcaatatccactcccctctcctcccagtaccccccccccacccagctccttcttccatccccccttctcccctgagaagggggaggccctctgggtatcacccacccttgcactgcaagacactgcaggtctaggcccatcttcctccactgagaccatccaaggcagcacagttagggaaatgggatccatagacagataagaggttcagggacagtccctgctccaggtgttgacctacatgaagaccaagctgcccatctgctacatatgtcccagagtatgaggggctaggtccagcccgtgcttgattcagtctctaggaggccccaagggtccaggttagttgactctgttggtcttcctgtggagtccctgtccctgggtccctcaatccttctcccaattcttccacaagtctccctgagctccatctaatgtttagctttgggtctgtgtatctgtttccatgggctgcagagtggaacctctcagaggacagttatactaggctcctgtctgcaagcatttaatattaagtatcattaatagtatcaggaactggttcttgcccatggaatgtgtctcaatttgggccagtctttggttagtcattccctcaatctccatttcatccttttccctccatatcttgtaggcaggacatatattgggtggaaggttttgtggatgggttgctgtctttatctctctgctggaaattctgaccagctgtacacatgaccacttcaggcatcgtatcccacactgctaagagtgtcagctagaatcacccatcctccctggggcctccctggaagggtttattttagctcacagtccaagtactggtctagcttgtggcagctggttacattgtttctgcagtattagaagcagaaagccataaatacttctatctttctcttttctgtacccatggaatggtgctacccaaacttggggtgcccacctcagcaaacctgatctagataatccctcacagatgtgcccagaagcttgactcccaggagatcctaccaagctgataaacactattagccaccaccctgatctagtatccaaaatgttcccgaggtcttcattagactaccctgccatggttgcctgcatgtcttcatttgaaaaacctattccatccatttgggtaggaatttcataaattcattccttttaatagctgagtagtactccattgtgtagatgtaccacattttctgtatccattcctctgttgaggggcatctgtgttctttccagcttctggctattataaataaggctgctatgaagatagtggagcatgtgtccttcttaccagttggggcatcttctggatatatgcccaggagaggtattgctggatcctccggtagtactatgtccaattttctgaggaaccgccagactgatttccagagtggttgtacaagcctgcaatcccaccaacaatggaggagtgttcctctttctccacatccacgccagcatctgctgtcacctgaatttttgatcttagccattctgactggtgtgaggtggaatctcagggttgttttgatttgcatttccctgatgattaaggatgttgaacattttttcaggtgcttctctgccattcagtattcctcaggtgagaattctttgttcagttctgagccccattttttaatggggttatttgattttctgaagtccaccttcttgagttctttatatatgttgtatattagtcccacattcacaaaggtaacacattcacaaaggaactcacacaatatgtactcactgataagtggatattagcccaaaacctaggatacccaagatataagatacaatttcctaaacacatgaaactcaagaaaaatgaagaccgaagtgtggacactatgccagaagtgggaacaaaacacccatggaaggagttacagagacaaagtttggagctgagatgaaaggatggaccatgtagagactgccatatccagggatccaccctataatcagcatccaaacgctgacaccattgcatacactagcaagattttattgaaaggacccagatgtagctgtctcttgtgagactatgccggggcctagcaaacacagaagtggatgctcacagtcagctaatggatggatcacagggctcccaatggaggagctagagaaagaacccaaggagctaaagggatctgcaaccctataggtggaacaatattatgaactaaccagtaccccggagctcttgactctagctgcatatgtatcaaaagatggcctagtcggccatcactggaaagagagacccattggacacgcaaactttgtatgccccagtacaggggaacgccagggccaaaaagggggagtgggtgggtaggggagtgggggtggtcgggtatgggggacttttggtatagcattggaaatgtaaatgagctaaatacctaataaaaaatggaaaaaaaaaagaaaaacctattcattcaatattgtatatctgctgtgaagattccttcagtattgtgctgtgccaaaataaatatttgcatgaagaaacagaaatttcgatagaatactatttaaaattattattattattattgttattattattaatttttttggagacagggttcctctgtattgctctggctgtcctggaactcactctgtagaacaggctggcttcgaactcagaaatctgtctgtctctgcctcccaagtgctgggattaaaggtgtgcgccaccactgcctggctgtggttatcatttttaatcaggatagaaaatgtttattgatgattttctttgtggtctctgtgtgagtaaaattctctgaaatgttattttggaaattcttgatgaaatactagtgattgacagggacagaaggctgggctggttacctgggtcttctctgtgatctgggctatgagctccatgtctgggacttgaccttgaacactgtggattcccagaatttactgtgtggatggcataggtcaggcaaaactgtctcccagaggagtggcttgtatatagccatgcaagtgttgcttaaatgttagcttcaataattataaatacaactatagcataattataaaaattaaaattaaaactcaagagagtggggacaaattgaacattttaggtaactacatgagaccatttatgctgctgtgacaaagcacaattggcttaaacaacagacacttatgtcttgtggttctggaggctgaaatgccatgttccacgaaccagatttggtgtatgtgtggtttgtctccctgacctgtcttcgtgagtgtcctcacctgaccttcctccaacacatggagctgaaggagtgtttagtgggtaaatcagattatcactccacccttatgactccatttaacctaaattacttcctaagagccctatctctgaatagtgactggggaattagggcttcaatgtatgaattttgtggggacacaatttagtctgtagtgataacctaacattatgatgacagcattattggaaatttgattttttttttctttctgtttttggtctcattatgacccagcagaaactgagaggttgccttgcacactgttcaacctctcatttggaaccacaccctactgtggttggtcaaagataatatgggagaaagagcataaaccaagggcggagatgatggtgttccagcgacaaccatgtggggtggtcagactgcctagggaagtctgctcactctgctgtagcagctgctccagtgtgtgcctggttttgtttgcctcatcccctcccacctgtgtgacacagccagattgtgactcctagatatgccttatgcactaaaatgatcagggtacctttcttttcattacaaataaaaatatactgaaatagaagattatgttgaagaaagtctgtgtcaaacatgaaaactaagaaaaatttgttcttggtggtttgaatatgcttggcctggggagtggcactattaggaagtgtggccttgttggagtaggcatggccttgtagaaggaagcgtatcactttgggggtgggctttgagaccctcctcctagccacttgggagaccgtcttctccaatctgccttggatcaagatatagaactctcagctcctccatccccatgtctgcctggatgctgtcatgcttccacattgataataatggactgaatctctgaacctgtaagccagctccaattaaatgctggcatttataagagttgccttggtcatggtgtctgttcacagcagtaaaaccctaagacagaagttggtaccagggcctggggtattgctgtgataggctcgaccacagttttgtttggaagaatgtggatttgggaactttagatttgaaaagcagtggaatgcttaattggggcttaatgggctatcctagtagaaatatagaagactttgttgctgagagtgatttgaatggttgaagaggtttcagtggagaagatttttagtatgtggcctagagactatttttgtggtattttggtgaagaatgtggctgccttttgccctgtctaactgaagagtctacctgaggctaaggtaaagagatttatactaattgcattaacaaaggaagtctcaaaaaagcccagcagagactttattctctggtttagtcttatgaagagcactctgataaagcatataaacctaaaaagaaaaaaaaattaaaatgtttgctcaaagattaaaagggcaccaagaagtgcaatggagctcccgtgtttaaggagataaacagattaagggagtggtgaccttggggtaacaatccacccagctaaatttagatccaggcattgaagtgcaagcctttaaccccaggaaatagaggcaagcagatccctgagttcaaggccagcctggtacagagcaaactccggggtgggggttggggtaagcttaaatccagggtgtacccattcaatcgtagcatttcagagacagagccatgcagatctctgagttcaaggttactccacagagcaagttccaagacagccaagcttgggcagtgaaggaaaccactggaaaacagaaagctggtgataatgtaatagaacaaggccatgttccagccccagcaagcagctttggccacatggcgctggctttagagtccagaatagaagggactactgggacaagtgatgttggttagctggagctaagaaagtaatggtaattaagaagagactagcatcactgaggtgttccaaagatagtcaagattatacctcatgctgcagctgtacttggtaaggtgtaaaagtcacctaggtggtactgattttgaaggcatgaaggggtcatggagagcagctggggcttgacactgaggggccaggaaaggtgcaacctcagttgcagttgatggctcaggactgaaggggtcatgcaaaggagttgaggctcggcaccatgaagggagtctacgagaggctattggtgaaggctaattgcagcagaagatcccagtgtattgaagatgccaataccatgagatgaccaccaagaacagcagcagcagtggaatggaaccagagcctagagtgctacagaggtcagagctggagaagtgactcaaacccttttgagaacctagaagattgtgtgcagatctcagaccctagaacaagaggctgtgaagctgaagttgccttggaaaacccaagatgttagagatgccagagctgtgggataagaaaatctgccaacagggagtagaaccagcccaagagaaagaagtttgttgcagtcagcaaagatgaaaggagttgtgcatcagacatggagatgcagagtttggagtttgcctggctgctttttcatcttgctttggtccaggatttccttaccatgattttttggaatagtaatgtatataggggattacagttaagtaataagtctcagaagagactttgaactttggatttttaatattattgagactgttgtagactatgggacttttgaggttggattaaaggtattttgcattatgttatggctaggtttggcccccatagactcatgtgtttgaaccagtctttgggagccagggaatggaatgtgttggtttgaatatgcttgacctagggagtggccctattagaaggtgtagccttgttggagtaggtacagcctttttggagtagctgtccttagctcaatagtgtctacaacataagtttgctttgtgtgtttgataatgaacactttgtatgcacgaatgtgtgtatgtatgtgtgttcgtgtatatgtacaacatgacaatgtcaatgtaaaacattctttttaaaaaatcaacattaagtttatggctgtttaaagatagaatgtcaccaattccagagttatagactattgggggcaaactctgtgtcagctctgggttgcttgctatttgtggctttaggccacaatctgtggcaaggtttgcccatgggcattgctgcagggacagttccacctgtcttctagattgctctgaggaaagacgtgagatgtatctgcctctaagtgccctgcagccgtgggtacaggatgtggagaccactgttccacgcagaactgcagggggctcaggagcgttgggagtaatgatccacctgcagactgacaggagcgtggaggccaccaccctccttgttgcaaatgtccttttgaaatatgttctaggctacaactactgtcctattaattatgtcacaagcctagtaaagctgaataattaatgatcgtggggcacttgcagctatagggtgtcatgtaaatgctaaggagtacaaattactccatgtattatgtagattccgtgccttacacgtattccacagtaagaaggttaatttctaggggagctaaaatctttctgttgggttttcctcagaaaggtggactgtcttaaacacattttaggagacttgggtttctatagcctgcagcatttgaaagaccaatggctggctgctacttacatccatgaaaatgaagtcatctaccacattttggtaaaagtttttgtttttgtttttgattctctctagccgaaggcaatttgggcccaaggacaaggaagaagtgaagatcattgagcaccaaatgcaggcactcaggctgatgtctcacctggccacagccctggccgtgaccttcacaagcaggtaagacggctctggggtgcttctaccccaggaaggggggtgggacacaggactcattttctaactatgagcaggaaagggccttggtggggtgggagaacctgatcccaggttcaaggcaaaacccaaaacttaactgagtatccagaagagtggaatccaccaagaattcataggtattgcaactaacagataggagctgtaccaattgtgcagcagtgaagagcatgactgatctttcagaagatctgggcttgattcccaccactcacatggcagctcataactatcgtgagctaagtatacccttaggatttcactgctgtgaacaggtactgtgactcttataaaggacaacatttaattggggctagcttacaggtttagaggtttagtccattctcatcaaggtgggagcatggcagtatccaggcacacatggggctggaggagctgagagttctacatctttatccaaggcagataggagaagactgtttcccacatgactaagaggaggtctcaaagcccacccccacagtgacagacttcctccaacaagaccatacctacgtcaatagagccacacctcctaatagtgccactccctgagccaagcatatacaaaccaccacattccactccatggcccccataggctctttcaaacacgtgagtctatgggggctatacctagccatagtataatgcaaaaatacctttagtccaacctcaaaagtctcataatctataacatagtctattgggtcccattttcggggatctaatactctcttctggtctctgtggccacaagacactctcatggtgcacagatatgaatgtaggcaaaacagcaaggcacataaaacaaacaaacaaacaaataattaaaacaaaacagaaacaaataacagatttgaacagttaaaaaataccttcaccttctggacaataaagctctgaaaactaggtcaaagtgtatgtactgagtgtctgttgaggcagaggcagggtgctggacagtcatggttatagcagtgtaagtgcacatgcatgcttacttccactacaggctttggagcgttttgctttagatttatttattttatgtgtaagactattttgcctaaatgtaagtatgtgcatcacacataagtatgtgtgcctggtaaccgagaaggactgaagagggcatctgatacattgaagctgggtcctctgaaagagcagcaagtgctctcaactgctgagccactttcataggcctcaccaccggcttttaacgatgcctttggatgctccatctcccagccctggggcagagcagggttgtgtgttttgtgtcactgtaatccctacatcctaaagacaagtaactttgaggtttgcctaagatcacagagcccaagaggatgtggactaggaagagaacatcaaactttagacctttcttctgtgttgttttttttctctaatgtgcaagttctgcttctcagtggggttgctgcagtcagtgtctgggtaacttacagcccgtgcttgttagaaaatttatacactgatgaacgagcaagtgttgtaagaagatggccacgagagaccttgccatgtctgatgtactactgacctgtggggtgccagcgtccttgggcctggctggggttttcttacaacacaaggaggggagtccatttcagggagtactgagaatgaaaaaagtcactgttttgtccaagctacctgagaaaaacataaatcactcatgcccagcatctgttacttaatagtttctgaacatttccctcccccagtactggggtgtcctagcaagctactgttgctgtgataaaccagtaaccaagggcaaattgggaggaaaaggttcatctgactcacatgtctgtatactaatccatcgctgaggtaaatcaaggcaggaactatggaggaacactgcttactggcttgctcccttcccctggcttactccgcttgcattcttttacaacccggaatcacttgctgaatagtggcgccacccacagtgggttatgccctcccacatcaagcatcaatcaagaaaatggcagaaagactggcttacaggccaattggatgaaggcaatctctcttcccagctgactattttgtatcaagctgacaaaaactaaccagtacacaggaataaaccgtaggctgctgggcctgctgggctagtgctgtaccactaagcacttctgagtagagtaaaatgcacaaattgtagtgtagagtttagggagtctgaccaaatatgaactattgtgtagcaaacactctaagtataaaccattttcatcacccaggaaaagctccctgggttccttgaagttgaaccccacttcaccaccgtagctgagacaacacgaattctgatttctattcctgtagcttggtttgattcgttctagtagagacaggtcacagttctagctttaggattcaaggtgggaaatgacaggtgattgacacaaattaataccaaatcgcagaactgttattgtgtgtcaggtgcggtactgtgctgtcgaacacatcacaaatccagttgctccgtgggcttctaagttcttgactgttgcttgtttgttgtgtgagtgtgagcacatgtatgttgtgcatatgaggaggtcagaagtcagccttggggctccccttccttcagcttctaaggaagtagcacataccaattcatggcagcatggccaaaattgatgctggcttctcccctcccccatccacttttcattttccttctccacaaaggttatcaacctagccatgggatttgtcttccaacttccttgaatgcatgctgcttgtctgttggcttcaggtttcaagcctgggtaacttgaggcttgactggtgagatactcagagctttggattccactcggagggatgggccaggactttaggtatacaagcctggaatcagtaagcaggagaaacagctctgcagccagggccagctggccctgcctctcctccagagtcttgtgacttcacagtggaaaggcagacagcagaagtcaggtggggtggggttttcttgggttatgtaacttgatcccacaatttgctacttgtgtgacttggaattctgtctcaatttctccatatacaaaatagtaatagtcaggagtaagagggctccggacttaggagcttttagtaaaggtcaaatgggtgaagatttggatgtgctcagaataaagcacccggtgctcagtaaattcgggcggcgtggtcattattctcaagattcctcaaactttcttcttttatctgagtgttgtgttttatttatttcagaatgattcatagttatagagtcaaccttattatacatcaactggagaatagagaaaatacggtacacagtcttcaaacttcctcttcccctgttctgccaattcccaccccctaatgtttgggtttgctttccccgtcatctcgactgaccctccttagctcctctctcttaccatccacctccaacctgcactttgtcaactttaccaccatcagcctcttgcatgaaaccaaagtctgagttctcaatgggactctcaagttatctcctgctctagagaagctacagctcctttgtgtggccttggaatgccttctctctggcacaccctgcccacttgtctgtgtctctcctctgttgggtctactactggactctgagctctatccctgggctcacaggcctcctgccaggcccctcccatcagtgcctgctgcatctatcccccaccccacccccccacacacacactcttgctttcatcctcttagacaaagctcttccaagcctgtacagttactcttggttgaggacctgacttgtgtgagcatagaagatgtgggtcattaatttggtgtcttcatatctcacagtgcctggctctgcataggttaattcaactaaggggatgaagttaccttgttcggtgacatcacctttggccaaggcatcagttagagttttgtatttaaaccatcctgatagcctgtgaagcatagatttcatgttgtgaagttcagaagttcctggccagggaagctggggatggatacctccctttggaaccatctagtgagatttgctatagaaagaaatcttccagcttagaaagtaactaacagctttttaaaaaatcctatttgtagtgcactagctcaaaagaatgtctgggtctgtttcttatttactcctgaccaaatgggcatctcaagaaggttgggctgggttccagaccagaggtggaggtagggtgtagaaacattcatgtatctgtctttcagctggatttagtcattctctagagaaatcttcccactcggcacctgtgaggatacaattcagataactgctaatgcatattcaggtgcttatagtgtaccagtctccgccttaagatttctcatgtactgactcaacatcttgagataactcaacagagtagaagtttgttctctctctctctctctctctctctctctctctctctctctctctctctctctctctctctctctgtgtgtgtgtgtgtgtgtgtgtttgtgctcatttaaatgcagaggctagaggggcacattgggtgacttttatctttgtccactttgtttacttgaaacaaagcctcccattgagcagagtactcactgtttgggctaggcaggctagccaggaagctctagggatctgccacctttgcccccaacgctgaggtggcaggcacacatgcccttgctatgttttactttttaacatggctactagggattcaagctaggatgtctgcccagcaagcctagggatctacctgcctctgcccccaactctagccagccgttcccttgctacatatttacccaagagaaaagaagccatgagccttcttgaagatatatacataaaacttcacaggcgtttttctaatcaacattattggggaataatttagtattcattcaaaacaagccttttaaatagatcgatggcggtaatgtctcacaagactgtcaagtcacaaaacactttcaaccacattccaaaattgcttacacatttctgcggtctatccctccctccagccccatcccaaggtcatggtgggcattctctttgccactcattgtagacttacttatagtaggactgtactgcatatgttgtgtcttccttatttcagttagtgcttttatttgggattcatccttgttacaacgctgattagtcactgctattctctcctgacaattagtattccattaaaggtattgaatatactactcttcttttgtgtatttgcttattgatgaatgcttcatttattttctgtttggaactattacaaataaaatggctgatcacctaatgacttgtcttgccccccctcttcattcttcaaagtcagcaatgcccacttgcttcctagagctgcatctctgactcttccctcctcttctcttctctgtcccattcacttttgtacgcagatacttctgttcacattagcaaagctgtgtaccccaggtctctagccacagctcccaagtccttttgccatatgagatgacatgcacaggttccagaggtaggaatatgcccttctttggggatcattactcaactatacaattcattgcagaattccaatagaggaggactttaaataaatggcaagtttgtaaggtatgcaaaacttttttgaaaataatgtggacctagactctatgcatagacagggaagaagagagataagcatggtgcagagggggaggccagcattagcaatggagcttaggaattgaggggacagtaatgtagtagagactggtggttgcaggcttagaggcagtaccgggagacagttttgtagggcatgcctgagtactaactggagtttatggatgcttctttcctgcatgggcttgacccactactgtatccaccatannnnnnnnnnnnnnnnnnnntgagatttgctatagaaagaaatcttcccagcttagaaagtaactaacagctttttaaaaatcctatttgtagtgcactagctcaagagaatgtctgggtctgcttcttatttactcctgaccaaatgggcatctcaagaaggttgggctgggttccagaccagaggtggaggtagggtgtagaaacattcatgtatctgtctttcagctgggtttagtcattctctagagaaatcttcccactcggtacctgtgaggatacaattcagataactgctaatgcaaattcaggtgcttatagtgtaccagtctccgccttaagatttctcatgtactggctcaacatcttgagataactcaacagagtagaagtttgttctctctctctctctctctctctctctctctctctctctctctctctctctctctctgtgtgtgtgtgtgtgtgtgtgtgtgtgtgctcatttaaatgcagaggctagaggggcacattgggtgacttctatctttgtccactttgtttgggctaggcaggctggccaggaagctctagggatctgccgcctttgcccccaacgctgaggtggcaggcacacatgcccttgctatgttttactttttaacatggctactggggattcaagctaggatgtctgcccagcaagcccagggatctacctgcctctgcccccaactctagccagccattcccttgctacatatttacccaagagaaaagaagccatgagccttcttgaagatgcatacataaaacttcacaggagtttttcttttctttttttttttaagatttatttatttattatatgtaagtgcactgtagctatcttcagacactccagaagagggcatcagatttcgttacggatggttgtgagccaccatgtggttgctgggatttgaactctggacctttggaagagcagttggtgctcttaaccactgagccatctctccagccccacaggagtttttctaatcaacattattggggaataatttagtattcattcaaaacaagccttttaaatagatcgatggcggtagagtctcacaagactgtcaagtcacaaaacactttcaaccacattccaaaattactcacacatttctgcagtctatccctccctccagccgcatcccaaggtcatggtgggcattctctttgcccctcattgtagacttacttatagtaggactgtactgcatatgttgtgtcttccttatttcagttagtgctttgatttgggattcatccttgttacaacgctgattagtcactgctattctctcctgacaattagtattccatttaaggtattgaatatactactcttcttttgtgtatttgcttattgatgaactcttcatttatttcctgtttggaactattacaaataaaatggctgatcacctaatgacttgtcttgccccaccccttcattcttcaaagtcagcaatgcccacttgcttcctagagctgcatctctgcctcttccctcctcttctcttctctgtcccattcacttttgtacacaaatatttctgttcacattagcacagctgtgtaccccaggtctctagccacagctcccaagtccttttgccatatgagatgacatgcacaggttccagaggtaggaatatgcccttctttggggatcattactcaactatacaattcattgcagaattccaatagaggaggactttaaataaatggcaagtttgtaaggtatgcaaaacttttttgaaaataatgtggacctagactctatgcatagacagggaagaagagagataagcatggtgcagagggggaggccagcattagcaatggagcttaggaattgaggggacagtaatgtagtagagactggtggttgcaggcttagaggcagtaccgggagacagttttgtagggcatcctgagtactaactggagtttatggatgcttctttctcatgggcttgacccactactgtatccaccatacatctctactttgtcttacaggcatgcagacgacatcctggatgaagacatcttccagggaagggcgctcaccaacagtcgctcgctacaggcactgatggctggactgaaagcctacagtacatgggagactgttagctgcctacaggactgtcgtgaatgcaccggaggcatggtgagtccctaagagcaggcctgccccatggtcaccagatcttcagggctgtgcttcatacagtgtgtgtaggggagtgggatgtgttgaacagagcaagtctttgaatcttaagtacactgtcactgcctctgggtacttaatattagcctgtgacctgtgcttattgtcttgtatggtgttgcaagtcctgatgtggaaatgcttggcatgcaataactgatcatgaagatcactggtgcatgtcattgaacttgaaggttgtggttgacaggataggaaatggccactgaagatgcagatgatcaaagctctgccccagaatttagtcccatgggtagaacacaggaaatgactttaagagtttccagctctgggaagaaggaagagacagagcatttacaagctgcagcagtgtctccagctccaggtcttagcctggacattgtgggtgagaaagtgcaatgtgagtctctgggagttgaggggtcccagagaacagctgtgttgtgttgcttgccctgggatctgttcatccaagatagggcataggcaacggaccaaagaaatggttctgctcaagttcagcttggtgaaccagtgagtgagtctgctgtggttgcctagaggagcatggggacacaaaggcatccatatcactgaaaagctcaccactgaattacggatgtgtgctaacatgcctggcatttgtgtgagtcctgggatttgagttcaggtcttcatgcctacacagcaagtgtgtttactcaccaattcattcccctagccccacagtaatgtttattctttacaaaaatccttgctaattgtacaacccttactttgtcttggtatattcctctccatccctcttctgccctccctgacccaccttattccccatgtataggtgacaatccatgaaagttgcatccctgaggttccccacacattttcatgcagccctctcaaaaaaaggtctcttctccccagcaactgccttttactttcataactttgaagcaggatcttgtgagttgtgtaacttttgttcactttcagggcctggcaaggtttggagcttctgagtcttatgaacctcccttctccaggaaggagtgcttcagtttggagaaacatttacataataggatcatgtatcaggttcttccacaattctgagttctgaataggattcaagaagactgtgttagataaagccagtgagaaagtggacccaatgtggtgtgtgtgtgtgagtgtgtgtgtgtgtgtgcaagtgtgtgcagaatatgtggatgtggtattgtggatcagtggccaggcattggctgtggtagtaatcggggttcagcccaaatggaaacaccatattgataacccccagaaatgtaacatttcagccacacagtctgaataggatagctcctgcagctcccaaaggacactttccagaagagatggacaaaaaaccaagcccctattggtcctttgatctaaatttgaagctgaatgtagttgactgttgtctaaaaagaaggaagaaaatttttagctttagtagagaaaaggtcaagagaaaattaagggcagttgtagaaaatcaaaggggaagtatgttttggaaggctgttccctggagttggggaaccctgtggagagataagtggaaggggacagagccactggcagagctgaggggcttctcccatgagctgtttgctggttcatcagaaatccagagtggctaagtagaagtgcacccaggatggtgaggtgccagaagacacatgtgtgtcttccttgcaggatgtttcatgggagatccctgggaaagggtgaatgaagaacggtgacctctgacattgacatacccttgtgctagattctccaaggtagccagggcagtggcttgttctgacttcccttagagacccaacaaaccaaaagactgctttctactattggagctcgctgtctcttcagataggaggatgacaacatctgggaacagaacttgggattctagagtaatgatgggtgaacagatgggaggtaggatctgaagggatcaggcagtggtgtgaggctgttcataaggggatgatcaggcacagctggagtctaagctggctcagacagtgttcctctgagagatacctcaagcccaaggtcttgtcactcacctgtgatcttccaatcatcttgcgttcctcctttggctcatcctctctgctctggtttgaatgtagttttgtttccattaaaactcattgggccttggctccctgatgcactgggattgaagtggcagggctgttaagaacgtttgggatcgtgaaaggttttcttgatagatgggatggcttagttctcctaggaaacaggaggtacagatgaagttgtaagctctgaatcatggcttggtctttctggctactgacccctccacaccccctatccctattctaaagctgtctaagcttatttaagttatctcatgaagacaaaagatgcttcaatggtcaggaaatcccatgggatttaggatatttgcgtgaagaactagtgtcagagaccaaatattaggacaaagtgtgttccaagcaccccactgttcaggaaatcacaggttttaggagacatgtgctggaggtagagacccaatatccacttgtctcattactctaagaactctgtgccaggaccagggggaaaagcatgctaagtgtgtacttcttattgtatcagaggcattgccacctgcacatggggtgaaggtggggtgtggcacaaccaaggacaccagaaaaggcatgagtctaaatgagggagcataggaggacagaatcgatgaggaaaaactggacttagactggagagaaagatgaatcagtgctgtgcagaactgtctgtggtaggctctcccaggtacccacatgtgcctgggattgtatccacagagacagagcctcagcacacggctaggaatgcagcagaccctccacagtgtctgctattctcatgaaaggttttcatgaatgctcttttgcagaggagaagtggagactggactgagtggcagccagagctggggctgagttcttcactaggtccctctgtcctaaggctgactagggtgtgcagcatgcaaagtggctaaggactaagcagtgaccacttgatagacaggtggacagatggactaatggacagaggggagtgagtgggtgtcctgtgtatctattttctctcattcttagaacttgagattgattcataaaacttgtcccctttcacctttctgtgcgttattttacttcagacaattaaaggattttggagtgtgtgtgcttgttcgtgtgtgtgcatgtagaagccagtggttgatgttggctgccttcctcaatcaccttttgttaatgagttaaatttccttttgacacttttgatggctatgatacatctaattattcttacccttgctgtcttctgtctcccgtccattactgtccattctgcctctttcctacaaaccccttttctacctttgtatcttttgttttgttttgtgacccactgagtttaagcaaggctacctgtaaaactgtggttgcagaactatcctttagagcccagaaggtatacaactgaaggccatgatttcttcttccccaacacccatcaacagccaatagtttccccagggagggggagaccctctgagtccttcccatccatggatgactgctaaaaaacccagctttgttcaggcccagtgcaggggatctctgctgcggtgcgttcatgaattctctgtcacactcagaaaacagtgttttgtagctcttctctccaacatttggctcttatactctttctcccacctcttctggataatccctgagcctggatacatgatataaatatttagggctgcatgctcatcagtcatagctagaacagccatgtatctctttcactgcaaagagaagcttctctgatccaggcttagggtggtatatatctatgcatataaatgtaaatatttagaagatagtattatgtgatgtcaacttatgaaaacagcagcagtgagtcctcccgtccccaccccagggcctatgaccttctagccatgactttctaaacaggtttaaagtaccaatcatgaattctcttctttggccttaagtctattcaggtatctgtcatttactcctgtaacagtcatgcccctattgttccagggattgcacttggcatggcgggttggaattatggcttcaacttttctcctctggcagcttctagcaccttctagccagcaggaggcatgctagccaggagaaagggggcttccagttaagttccagcttcatttctctatgtcctgccacccacgtttgtcccaccttatttctggagactaggtctttctctgaatatggagatcactgatttggtagacaggctggtcagtaaactccagaaatctacttgcctctccagggctggaatcacaggggcattcaccacccgcagctttctgcatgggtgatggggatctaaagttaggttctcatgcttggacagcagacatttactgactgagtcatcatgactttttatggagaagttgccagccttggccgtatgtcagtcatatccaaagcacgagtgccccactggcagctcctttgaggggatgacaaatgtgatgtcatgtctagtatgggagcaggaaacttgaaaaattacatagtgtgctaagataggaaccgttctggcaataatctttgctgcttctctcttatcaccagcaatcctcctaacctttgaggcactcctcttaacttctggctttcatgtctggcactagtactcagcatgagtgttatctagggagggcatgttatttcctcagtgaaacaattttttttaaagatttatttatttattatatgtaggtacactgtagctgtcttcagacattccagaagagggagtcagatctccttatggatggttgtgagccaccatgtggttgctgggatttgaactcaggaccttcagaagagcagttgggtgcttttacacgctgagccatctcaccagccccaacaattttttttatatattttttctttatttacatttcaaatgttatcccatttccttgtttcccctccaaaaaacccttatcctttcctccccctccccctgctcaccaacccacccactcccacttcctgatcctggcattcccctacactggggcattgagctggcacaggaccaagggtctcttctcccattgatgctccacaggccatcctctgctacatatgcggctagagccataggtcccttcatgtgttctctttggttggtggtttggtccctgggagctctgggggaatctgattggttcatattgttgttcttcctatggggaaaaccccttcagctccttggttcctttctctagctccaccattggggaccctgtgctcaatccaatggttggctgagagcatccatctctatatttgtcaggcactggtggagcctctcaggagacagctatatcaggctcctgacagcaagcacttgttggtatccactataggggtatgggtttggtgactgtatatgggatggatccccacccccttcagtgaagcaattttaaaaccacatgcattatgtttcttttcccaattgcaaaagcaatgcatcctttctgtatatacccactgtagatgttttttgaaaataagaaaagcacagagaaggaaggaaatagatgctacacctgtgcttctaagcaatgacacgtttctaagccacattctttctatgcactggtgtgtttaaagttttataagttcttgcccctgaggcagtaaggacaatacttcagatttcacgtatgcagcagtgttagtgtctggtaacatttatgatgtatgtgtaacataatttaactaaccaactatggtggtttgaagatgtttggcccatgggaagtgctactattaggaggtgtgtccatgtcagaggaagtatgtcactgtggaggcgggctttgagggctcctacagctcaagctctgccccgtgtagaagagctagtcttctcctcggggccttcagatccagatgcagaattctcagctcttgctccagcaccatgtttgcctgattcctgccatggtgaaaatggactgaacctctgaaactgtaagccagccccaagtaaatgttgtccattatcagagttgtcttggtcatgttggtcccttcgcagcaatggaaatactaactaaaatgccaaccttcagttatataacaatctattataaaaatattctaatacctaactttggtgctaatttgtgtgcatattctgcttttgggggaatacatatttaaataatactgacactgtgaacaaaggttatacatatttcttcttctatcagcaatcaaaaccaaggcctaatagtttctagaccagtggctttcaagttctcttgatcatgacccccccccacacacacacaatagaattttcattataatccagaaattccatacatatatacatacatgaaaagtggaaaaaaaatagaaattttcatgtaataacactggccttcccatcctgatgtgttctggtaatttcctttcattttaagaaaagcagaccaccatgcattacctggacttcaggacctgctggtgtgtcacagcttgctgtttgcagagcatagccaggctcactggtcaaatcccagagtcttactctaggtagctggggtttcaacacagagtccaggaagctgcagtgttggaggatacattgtctagtccaggctgtgggatgccttcagtgactggaaggtttctaatttcacccccttggtacttaagattttgtatttgaagttcaggaagaatggggaccccaattatcttttgagagccaatacaacatagtaaccatttcccccctacctgcctgaatgaagcatccggctgccactgctgcttttgagtatccctgcaggagccttgagatcctcagactccttttgtctacaaagggatatttccttagcccccaatggctcacttaactaagtaagcactctgtgttaggaattattgagagagtcataaactggttgtttttatagtgttttattagttcttgctttttggggagggtggtgacagcctacatcttcgaagagtaatattttacttctctaagaaccctctcaatgaagttgataaatgcaggctggaagtggaacttggaaattacgtcatctctaagcctttgcttccaggttctctgactagctgcacctttgcaacattgttgctcactttttgtgtgcaaagcctaggacgcatggccttcatacaaagaaagagtttcccaagtctcttatttcgttgcccatgctattaggaagtgtcatagttcaagttcatgtgagcacatcctaaccctaatggctaaaggatgattgtgaagtaaggacacacttactttgttaggcggtaaccctagggcacatattcttgtccagaaggtgatgtgaagcaggttctgtgcactgggagtggcattagaagacccagagactttactctcaggatcattaggggttttctagctgtgtttgactaacaggcaacagatttactttcatgacctaaacagcaacagaaggtcaatacatgtgcactgagttgtttgcaagtcactggacatcaggcaagaaagagtctgtgacctttgacccacacaagccttacaactgtcccagttcactgccttgagagtgtttctaggctgtggctgaggaggggaaaccaaggcagaacccagagaactccctgtgttcagagtatggagctgaaagtccaaggagagcaaagcatgtgaattcacaggactgacgagtgaacgaagcaagaactcagatctgcagcagggtcctgtaaagagtcactaagacctcttgaatgcctgtgtgtgtgttactaaaattcctcccctggatacggaccacatctgccactcctcctaaggtcctaacaacaagcctgagtatgattttcccacagttcaacctggggatcagtgagtttatcgggattactcatagaacatgaggttaccgacgggaacatgaatagctccaaacaaccacagggaaaagtctctgcccagtatggataatgatcacatatatgaagagccccacctacaggctttcgtgctcagccccaggccacatccagtaagaacaaaactgcatgcaaatggccgggggtatctggaggagggtccagtggcttttctcaccgcctccttctctgagggaatgttagcagtctgcaggcctgacagggacaggctccaggctgatctctggaagatggtgttggtttagctccttccaagtgtaagggcgtgcctcaaagctgagtgaggactctctcagaagcatcggagggacagcgctcagcggacacatggcactgggagtgattgtttttgccatctttaaaaagaaatgctccatataaaagaatcacctgtaaaactgacagcagggttgtcactgggagcaaggcaagtcagaggatgcagaaaatcattttcaaagatctgaatgggacgaaggcaacctaaacttgcgcatccaacaaaattatgtttccaaagcaaaggtgtagttaagatgcatcatcacaactgcgaaagctgaaagacttagtcactggctggctttcgctcttggaaatagagtaattcttggggagaatgaaaaggatcccagagtgaaaagaataaaattagtaactgcaaggacaaacaaatgaggtggtttctcagcatttaaatcgtacacacacctgaactttggaaacagggtctcactgtgcagccctgcctggtctctgtcctcccagcgagtgctgggatcacaggtgtgcacctctgcccagcttaagtgcttttaacaaagattacttaaacacaagtgataaccttgtagcctgaggtcaagctctgagtgccgtggttccattcccagacttttggctgaaaccaagtatgacataacaaaggcctggagggaagagaagaatgctgctactgaaaggtcttaatcctcacacacggctgtgtaacagcacttgaaagtatactgggaacagttaaagatgggtgctgtctgagttttccttgtttggaacatttaaccagaagtgtttcagtttggggagagtttctggattggagaatattttcacagacatgactatgaatgctgaagcactttgaaacccaaaacctttccagattttatagcatctgggatttcccatttttgtaccatgaacactaagatctctgccagaataatacgacaagatttataactagcatgtgattttgaacaataccaaagtaatcagaaagatggggatgccgtaaggaaactgaaccacagatgttaagtaacttgcccaagtttaagctctaaatggtggcccagcctggcttagaagcaagctctcaaggatgtcatcctgagtgaggtaacccaatcacaaaagaactcacatgatatgcactcactgataagtggatattagcccagaagctgggaatacccaagatacaattcgcaaaacacatgaaactcaagaaggaagaccaacgtgtggatactttgatccttcttagaagggggaacaaaatacccatggaaggagttacagagacaaagtgtagagcagagactgaaggaatgaccatccagagactgccccacctggggatccattccataaacaactaccaaaaccagacactattgtggatgccaacaagagacttgctgacaggagcctgatatagctgtctcctgaggggctctgccagtgcctggcaaatacagaagtggatgctcacagccatccattggatggagcacagggtccccaatgaaggagctagagaaagtacccaaggagatgaatgggtttgcagccccataggaggaacaacaatatgaacaaaccagtatctccagagctccctgggactaaaccaccaaccaaagaaaacacatggtgggactcatggctctagctacatatatagcagaggatgacctagttggtcatcaatgggaggagaggcccttggtcttgtgaaggttatatgccccagtataggggactgccaggaccaggaagcaggaatgggtgggttggtgagcagggggaggggaggaaggcataggggttttttgaggggaaactaggaaaggggactaacatttgaaatgtaaataaaaaatatctaataaaaaataaaattaatttttttaaaaaacgaagcaaagctctctcccctttataaccttagttcatatgcaaattgggtggtggtggctcaccctctactctacaatatagcggagcctgccctccctccctaatggggagcaatttgtatctgatctgtgtctttgcaatcatatgaacttgagcgaacctctcacctgcctgtgcctggttccaggagtctgtggaccatagcagtggaaatccatccactggaccagaccttctttttctattagcccttttgagtcagtttctcaatgtttccttcagagggaggcaaggtgggttgttactcaccccaggcctcttcctaagtctgggagggtggcaactggagttggcaaggccaaagctgcttttcgtatgctacatttaggtctctattcttggtatgtaagtggaaaaccaaactggccttgttcagatgtgttgaaagtctttcacctggctctgtggggagccagttgttgaaagcttcactctccagcctccaggaggtcacatggccagagcccctggcttgcttctctttgtcacccacattctttccttatggattaatggggtcaccccagttctcaggactgttgctatgtaactatacttaccctgtttgagtaattctagattgaattctataatttcattcaagagagcagtggggaaatggccttggttttacatttctgtctttgtggacatctggaagaggtatcttgtcatggcagaggtaccattgtgtttggaacatcatggtcaaggctctacatggctcttcccatggaggacatcaatttctcaactcatagatcccaggatctgggctagcatctagtaaatgcagccagtcccctgtacccatccatgtatcctgtccctggctttaaccaactgcagattagacatattcagaaaataattgtgcctcaactaaaatgtttggattcctctttttcttatcatgactccctaatctatatcatataacaaatatttacatagcaataggtatgagaagcaacctggaaacaatttaacatatttggggtatgtgcaaaggttaagtaccattttatataaaggacttgaacatccaaaatccgggtacttgcaataagttctggaactactcctctatggccatcaagcaacaatagtgcttgattctccctcctttcccttttatgaacgatataacagatgaaccccaactttttccctttctttcttctgttcttcattacaacttactggacacaagtgggagccacctggttggggtcctcagggtaaggttttggactatggaagctgagtccaaagcctcagggtctacagaaacaagcttggagtttggacacaactcatgggtcttgctgtctccttacaaggtcagagcccttggtggtaactaaactctaaacatacccatagccacatcttatacctttgtcttggccccagaaggtactaagcttgagctgtctttgagaccagtctccccagcaggatttatgacctacctccacgcatggagcctgcttattctgcccctcgatgtttcatttctcctttgcatgttccagaatcccacacagaacagcacagggaaaagcagaataaagaaataagagaacaaaactgagcaagccaaagtctcggaggagatgtgcgatccagcataatgatgaggttatcagaaagcaggccttgaccctgcctttcatgtctcacacggagctgctgtttgctgtttgggggacacagtgcagctggatgaagcccgagtgattacatccagtgattgcataacaaaacactgagacgatgcctgtaaactaaaaaaaaaaaaaaaatgaggggagtgtggaccatggctgctgcttattcagtagacttcatcctaaggctaactcctcagggacattcaacaccacctcatttatctggcatcaactaaccttggaacagatccaaggcctgacataaacagaacagatctcagggaaggccagagatgcctagaagcctgggctctagagtgtaagctccgctccactcctgaaggagcctggttggtttcagctatgagcaggccttgtgtgttggcacttggctcaggtttcagatcctctgcagagggaggatcgaggctctttgaatacaggtggctaagagcacctagtagtacctgttagtgcctcagaaaaatttgaagagttaaaaaaaataggcttaaaaatccaagaatatagacagccctgagaagaagtctaagctcaccaggaacacagaggtcaccctgtcacccagcagtgcaagctttgtgtgggcaaacaggctagcacagggagggacaattgcttgatggtcacccattctttcaggtcctatagatgtattatctataggataacatttatttaaatccttcagatttctgtgcaagacaagtaggtcagcttgcctcagatctgtgataatagagactgtttggcttcctgaccaaattgtggagaagcaacagggccaagaacaatcctggctggtgcctgggtcatgtgttgagaggggtgctgctgaaggattctggctctcaaactcaggctggctggaactgcatttgtgtgcgggattagagcctattgcagggctagggtctgctgcagagttagggtctgctatactagggttggggtctgctgcagggttagagcctgttgcagtattaagatctactgttatagggtcagggtctgtttaagggctagggtctgctaaagggttggtgtctgctgtagtagagttagggtctgctacagggttagggtctgctgcaaggttagtgtctgatagagttagggtatgctagaaatgcccataattcaggcaactgggaggcaggtggaagaagtcccttactcagggttcaatggggggaaacgaaatgttcagagatgggttgtttagggttcaagtgttgacattatcatggtcgccacttacacctttgttagccactgacaactcggcatctttcctactcttctggaactcatcaagatcactgaccaactctctgccctcaagcttatctgtcagacactccctctccaaggattgaagttcttcctgaagagtcccactataccagagctctgaattaaaacctagtaggcctcattatagattctctactgccattctgagaattacacagacagtaatgagtttgcctgtcttgatattttatttaaaaaaacaacacaataaacatcacctcatgatttagatgatttttcagcatgattccaagatgagagcaaacaactcttgcttttcaaaagaagttttaatgtttaagtgaagttactaataatatatgcataccacacaccatgtgagtgtaggcgcaagtaccatgcgtgtggaggcccaaggacaatgatctggggtcagttctgtccttcactcaggatggaacttaggtcatcaagtttgcaccagggtcttttatctgctgaaccatctcactggcccacaagtttctggttttgcctgctttaagttttctaagcccctaaaaggtcaagtacctgaggctgtgtggctgtctaaggtgcagggactttgttattctgtgacttagctatggctggaacaacaagctgtaagatgtcatttcttcagatctagtgaaaggaggcaggcgttctaaacaagaccgtcacctcaaacaggtatggtgatatacacgtgtaatcctggttcaagaaacaaaggcaagaagatccaccagtccaaggctagtatcctgggctacacagtgaacctgtctcatatacttgtatatgtatatatatatgtgtatttgtttgtataagtgtatgtattgtgtttgtgtgtatgtatatgtttgtgtgtatgtatatgtttgtgcatgtgtatgtatttgtgtacatgtatgtgtttgtgcatgtatatgtgtatgtgtattgtgtatatgtgtttgtatatacatatatgtatgtgtttatgtacgtttgtgtacatgtatgtatttgtgtatatgtttgtatatatgtatgtttgtgtgtatgtatatatttgtatatatgtatgtttgtgtatgtgtttgtgtttatgtatgtgtttttatacatgtatgtgtttgtgtacgtgtatgtgtatgtgtttttgtatgtgtgtgtatatgtgaatggcagagtggctcataggtggggccaatttcttaggatgggcccttgcatgtgggcatatgagttcccagggaggaggactccatgcaggggtgggctccgtaggataaaatgaacaagataaatagacacataagctagagtgtttttaaatttaaaaatagatacgagaccttccaaacccaaggatcctgtccctgatttaggattttgcctttctaattatgtatgtagggaggccagggaactttgtgcctctgggttttgtattaattagtgttttatacttcattcctacttagtatattacatgtttttaaaacaagcctgtttgtattttgttgtgatgttgaagtcactgaggagaaatatcatccctgtatgtgacagtctctgtgttatctctgggacagtcttatgttcctgggtccggtcttgctaggcaaattagagtgtgtagtaacaggcagtaaaactgacccttgtcactgataaaggaaagagaaattgctacagtgatccaaggataattaatttcattggcaacatgcctctaaaaatctcagcccaaacttcttagggaagaaagtaagttgattataaatgtcagacagagtggagagcatccagacccacggtggataaaggacgagtctggcatggaacctgagctactttgccagactcagaatctgttgtgtagtgtctttttcactccttttcctcttgtaagataactccctaagaggatggacacacacacacacagacatgcacacatgtgcacacacacacacatacacacaggcactcatgtacacatcccttttcctaaaacatgaaccaacatacatgtgcacatgcatgtgtacaaatatgtacacatgcaaaaatatcatatcaccttcactgatttacttcagagcattgctctttttcttctgttatctggaaaacattgcatggagctgagtaaagtgagctgtcctttgactatctggcacagcagttaagggtcatgtggttggtcattgtaaatcaatccttccttccttccttccttccttccttccttccttccttccttccttccttccttcnnnnnnnnnnnnnnnnnnnnnnnnnnnnnnnnnnnnnnnnnnnnnnnnnnnnnnnnnnnnnnnnnnnnnnnnnnnnnnnnnnnnnnnnnnnnnnnnnnnnnnnnnnnnnnnnnnnnnnnnnnnnnnnnnnnnnnnnnnnnnnnnnnnnnnnnnnnnnnnnnnnnnnnnnnnnnnnnnnnnnnnnnnnnnnnnnnnnnnnnnnnnnnnnnnnnnnnnnnnnnnnnnnnnnnnnnnnnnnttgccctctattcccctacactggggcatctatcaagccttcataggaccaaggacctctccctcccattgattcctgacaagaccatcatctgctacatatgcagctggagccttgtgtactccttggttaatagcttagtccctgagagctctggggggtctggttggttgatattgttgctcttcctatggggttgcaaaccccttcaacttctttagtcctttctctaactcctctattggggactcactcagtccaatggttggctgcaagcatctgcttctgtatttataaggctctggcagggcctctcaggcgacagccatatcaggctcctttcagcatgcacttcttggcatccacaatagtgtctgggtttggtaactgtatatgggatgaatccccaggtgggacagtttctgaatggcctttccttcagtctacttctctacactttgtctccatatttgcttctgtgagtactttgttccccttctaagaaggattgaagcacccacactttggtcttccttcttcttgagcttcatgtggtcagtgaattgtatcttgggtgtttggagcttttgggctaacatccacttgtcagtgagtgcataccatgtgtgttcttttgtgatccggatgatattttctagttccatccatttgcctaagaatttcatgaatttatcatttttaatagctgagtagtactccattgtgtaaatgtaccacatttacttgtatccattcctctgttgaaggacatctgggttctttccagcttctgtctattataaataaggatgctatgaacatagtggagcatatgtccttattacatgttggagcatcttctgggtatatgcccaggagtggtatagctgggtctgcaggtgttactatgcccaattttctgagaaaccaccaaaatgatttccagagcagttgtaccaacttgcaatcccaccagcaatggaggagtgttcctctttctccacatcctctccagcatctgctgtcacctgagttttttattttagccattctgactggtgtgaggcgaaatctcagggttttgatttgcatttccctgatgactaaggatgttgaatatttctttaggtgcttctcagccattcggtattcctaagttgaaaattctttgtttagctctgtacgctgttttttgttttttttggttttttttgttttgttttgttttgtttttgtttttttttaatagtatcaaccagcaaagcactgtcatcttcaaaagccataaaaacagtgttcctagtagcatgtaccacaaagctgaagacatcctttgcattgtatgttttttctgtaccccgtttttaatagggttatttaattcttgggagtctaacttcttgagttctttgtatatgttggatattagcactctactggatgtaggattggtaaagatcttttcccaatctgttggttgcccttttgtcctattgacagtgtcctttgccttacagaagctttataattttatgaggtcccatttgttgattcttaatcttagagcataagccattggtgttctgctcaggaaaatttcccctgtgcccatgtgttcgaagttcttccccactttctcctctattagtttcagtgtctctggttttatgtggagttccttgatccacttggacttgagctttgtacaaggaggaaagaatgaatcaatttgcatttttctacatgctgaaagttgaaccagaaccatttgttaaaaatgctgtctttttttcactggatggttttagctcctttgtttaatatcaagtgaccataggtgtgtgggttcatttctggatcttcaattctattccattgatctacctgtaccaataccatgcagtttttaattacgattgctctgtagtacagcttgaagtcagggatgatgattctgccagaagttcttttattgttgagaatagtttttctatcctggattttttgttattccaggatgaatttgcaaattgctctttcaaactctatgaagaattatcttggaattttgatggggattgcattgaatctttagattactttcggcaagatagccatttttactatattaatcctgccaatccatgagcatgggagatctttccatcttctgagatcttcttccatttctttcttcagagacttgaagttcttatcatacagatctttcacttgcttggttagagtcacaccaaagtatgtaatattatttgtgactattttgaagggtatcctttccctaatttctttcttagactgtttatcctttgagtagaggaaggctactgattttttttttttgagttaattttatatccagccactttgctgaagttgtttatcagctttaggagttctctggtggaatttttggggtcacttaagtataaaatcatatcatctacaaatagtgatactttgacttcttcctttccaatttgtatcactttgacctccttttgttgtctaattgctctaactagaacttcaagtactatattgaatagatagggagagagtgggcatctttgtctagtccctgattttagtgggattgcgtcaagtttctctccatttagtttgatgttgactgctagtttgctgtacattgcttgtactatgttagctatgggccttgaattcctgatctttccaagacttttaacctgaagggatgctgaattttgtcatatgctttttcagcatctaatgaaatgatcatgtggtttttttcctttgagtttgtttatgtggtggattacattgagggatttctgtatattgaaccacccctgcatacgtgagatgaagcctacttgatcatggtgaatgatcattttgatgttcttggatttggttggcaagaattttattgagtatttttgcatcaatgttcataagagagagtggtctgaagttctctttctttgtttggtctttgtgtgatttaggtataagtgtaattgtggcctcatagaataaattaggtagtgttccttcggtttctattttgtagaatagtttaaagattattggtattaggtcttctttgaaggtctgatagagttctccactaaactcatctggtcctgggcttttttttggttgcaagattataaaggactgcttctatttctttgggggttatgggactgtttagatggtttatctgatcctgttttaactttggcacctgttatgtgtctagaaaattgtccatttcatccagattttccaattttgttgacgctaagcttttgtaataggagctgatgactgttttaatctccacagcttccattgttatgtcttcattctcatttctgattttattaatttggatactgtctctgtgccctctggtaagtctggctaagggcttatctattttgttgattttctcaaagaaccagctcctggttttgttgattctttctgtcgttctttttgtttttatttggttggtttgaaccctgagtttgattacttcctgccgactactcctcttgagtgtatttgcttctttttgttctagagctttcaggtgtgctgtcaagttgctagtgtaagctctctccagtttctttttgaaggcacttagagctatgagttttcctcttaccactgctttcgttgtgtcccataaggtttggtatgatgtatcttcattttcattaaattctaaagtctgtaatttctttctttatttcttccttgaccaagttatcattgagtagagcattgttcagcttccatgtatatgtgttttccattgtttttgttgttattgaagaccagccttagtctgtggtggtcggttagggtgcatgggattatttcaatcttcttgtatttgttgaggcctgttttgtgattacgtggtcggttttggagaaggtactttgaggtacggagaagaaggtatattcttttgctttaggataaaatgttctataaatatctgttagatccatgtggttcataacttctgttagtttcactgtgtatctattaatttctgtttccatgaactgtccattgttgagagtggggtgttgaagtcttccactattattgtgtggggtgcaatgtgtgctttgagcttttataaagttgcttttatgaatgtgtgtgcccttgcatttggagcataggtgttcagaattgagaattcatcttggtagatttttcctttgaccagtatgaagtgtcctcccttattctttttgataacttttggttgaaagtcaattttattcaatattagaatggctactccagcttgtttcttgggaccttttgcttggaaaattgttttccaactttttactctgaggtagtgtctatctttgtcactgaggtgcatttcctgtatgcagcaaaatgctgcatcctgtttacataaacagtctattagtctatatctttttgggggaattgagcccattgatgttaagagacattaaggaaaagtgattgttccttcctgttatttttgttgttagaggtagaattatgtttgtgtggctatcttcttttgggtttgttgaaagattactttcttgctttttctgaggtgtagtttcccttcttgtgttggttttttccatctattatcatttatagggctggatttgtgggaagagattgtgtaaattttgtttgtcatggaatatcttgttttctccttctatggtaattgagagttttgctggatatagtagtctgggctggcatttatgttctcttagggtctgtatgacatctgtctaggatctcctggctttcatagtctctggcaagaagtctggtgtaattctgataggtctgcatttatatgttacttgaccttttcccctgactgcttttaatcttctttctttgtttagtgcatttggtgttttgattattatgtgacaggaggaatttcttttctggtccagtctatttggtgttctgtaggcttcttgtatgttcatgggcatctctttcttctatagtttagttgaagatatttactggccctttaagttgggaatcttcactctcttctatacctattatccttaggtttggtcttctcattgtgtcctggatttcctgggtgttttgggttaggtgctttttgcctttgtattttgtttgactattgtgtcaatgttttctatgatatcttctgcccctgaaattctctcttctatctcttatattctgttggtgatgcttgcatctatgactcctgatctctttcctagattttctaactccagggttgtttccctttgtgatttattatttctatttccatctttagatcttggatggttttgcttgtttcctttacctgtttgattgtgttttcctgtaattctttaagggatttttgtgtttcctctgtaggggctgccccctgtttacctctgttcttttgtatttctttaagggagttatttatgtccttcttaaagtcttctatcgttgccatgagaagtgatttttagacccaagtcttgattttccagtgtgatggtgtatccaggatttgctatggtgggagaattgggttttgatgatgccaagtaaccttgatttctgttgcttatgttcttacacttatcttccgccatctggttatctctagtgctacctgccttggctatatcttactggagcctgtccttcttgtaatccttgtgttagaactcctcagagtccagttgtctctgtgatcctgagatcctgggtgtgtcagagttcctgggagtcaagctgcctctgggaccctgagatcctggtgtgaccaagctccggggatcatgtgatcctgtgatcctgggcatgttagagcgcctgggagtggagcttcctctgggtgttgtgggactgtctgcggaatttgtgccttgtgggttctttctaagaacacatgagaacacagctttgtttcttcagtggctataagctattttctttttggaagtctgttttgataatttctgttttactctaatttttccatttcttttcagtttcacatttttgctggcagagcattcacaactcccattctccttttaaatcctgatgtatttgtaattacgactcctctgtcattcctgcagacatttgtttttcttaccctctgaacttatcttgcatttattatttaggtgataatctctctgttctcttcagtgcatctggttttcctggtctgtagatttttattattgtatttctttccatcttctggagtttattttcctacttacagtatcttctgaaaactttttgtagttaaggttttttgcatatgtatgtgtatggtgtgtatacatgtgtacatgcatgtggaggcccaagactaacagggctgtttcagctagtctggctaggcagtttgtgtggggcttccctgtctcttcaggattccaagaacccacataaaagcatttcggctcacctgtaacccaggatttggattacagccagttatagcttagcgggtatgcatgcagtgtggctctgggatccaaatcctggttcccatcacccattgagttgctttcccagccctcttccagtgtcttattttaagggttattaatttccttaatgtctctcttattataaacatttaatgctacaactccccttctgaaatactgctttgacattattagttgtgatttaatgtagaaaactttattaattcgaagtatattttaacttccactatggcttactgacccatatgtttctcaagtgttttttaatttcctgatggctgatacttaaagatggtaagaaatgtttgactgttattaaatttttaatttgtgttatgagccatcatatttgcacttggcattacttacattagtgctgacaacagccatacaaggtagagctagtatgacccccgtattgggtatgtgaaacatggggcactgggcatttcattaattttctcaacaccacggaacagctgagtagatgggtctcaggttcaaatccagaccattcagattaggactaaccattgcataagccgtcattgtctcagttactcttcttgttgatataataagaatgaatattctttattcttttttttttcggtttaattcctccacagtaagagaacacagccagtatagcacagactttcaaaactatgtcatgacctacactgtggcattgcgtgtggtcagtttcaggatccacctcaaaggcatggatgctattatctggtgcagtctcctaagtgatcaagcccaagatttttggctaatggcgtctataactgtgttaacttcagattctgatcacactgaagttatgttattagatgatcacacagttagggttaccttatcttcctggtgaattaaactttgatttgtagatagtagctcccttcgtccctaatgtgctctaaggtaggggtacggttcaggccctagagctatggtttggaatttcagagaacatactctaatccacccactgctggagtgcagctcacaaatcccccatcgtcttgggtgggcatggatggagagggtagtttatcatcattcgtggtggtcttcagaaggctagctcattccagttgactcttttgaacctgctgcctggcctagcactggctgccctctctgaagtcaggtctgacctttgtttatctttgagtattgctgacagcctgatttgtccgttttaaagacatttctctagcatatttgtgataattcctactagaacaattttgacaaccgtatctgtgctgctgtattggcagagatgaatatcctgagcaaatctgcctttctctcctctggcttgtttttcttaagtcaccatgtattcccagtgactcagttcaaagggcacttaccaactctagaccgtagtagcattcttgatagtagagttccttttcacgagtgtccctttccctctgtattctgtgctgagcagccagcttctctctgtcctgatatctcctctgccagtctccttctgtctaacctcttgaggttgcttagagtcttccttttctctgtccacttagattgcacttctttgtggagttttaaatcctttgccgaggtaagaactatttccatgccagatttttcacatctctagattccctatgtcccacgaccattgagaccagtccactgggaagtcacactgactctcactttgatacaaatttgaatgtgttcctttgagggtcccctatccacgattggccattgcacactggtagtctcagggtgcagaggagcaggggagcagggagactgttttagaggacaatttgtctattgaaatattggagttagcttatatactttgagttctaggctcaagtcatcctcctgcttctctcttttgagtagttaagactctaggcacatgtcacctgctcagctttctcttactgtccctgacttacaccagatcttctatgcttgcagggtgtgtgtgtgtgtgtgtgtgtgtgtgtgtgtgtgtgtctatctgtctgcatgtgcctatgtatatgatggaggccagagaacaaccttgggtgttgttcctctggcactgtccacctttgtcttattaacatagcatctctcacttgcctggcatttgccaagtaggacaaggatccacctgtctctgcttccccagtggggggattacaaacacaccctgctattttatttgtttccatgggttctggggatctaacctgggtcccagcacatgcacaaccatcactttactgggctatctgttgccccagtcccattaccacagatttttaatgatcaattttattttactagtctatccattgatttctgtctttcttgagggcaggacaaagtctgattcattatagacagcctggtatccacaacacaaggcaggcatttggggacagaattcaagaaggaatatcctctggcccttgccagttcctaagttctgagaatgcaattccttaacaagagggctcaacacatggagggcagagccagctcagtgggccagctcatcattaactctgtgagaccaactctggattcagaagactcagcccagatgtggctgtctccagaagagttatggtcaatctccacactctttcctcttgcctaggagtgaatgatggaggcatgcagaaacaatattaacacagttctaagacagctagctcccctggccgagaagctctattcctctgtgtgtttcattggccctctcttaatgagtaagttaagattgattgcatctgtttcttctttaaattaacaaaatttaccctgtttgtttaaaaagagggacaaaagcctgtttctaatttgttctgatacatttattaaatgtaatcatccagtaaaaaaaattcagagatgttgagaacagcaggaaaatattaaactttcaaaatgcagagcttgaatcataaaacctgtttcataggctctctatgaaatgggacataaccccagtggcattcgcaattagctgctgagctgctcgatgtaacccagagggccgagagagagtagcacatccacccaacgtgttcccacttctcacagatgagattctgggctgcgttacccactgaggcttctggggcgtgcgtttagtccacatttcttcccttcattcgctgttgttttattaagagtgaagtcagctaatggaaaattttacttacttttggaggatgactttttctttcccctactccctttttctttcccattcccccataaaccccaccaggaatagagaaacaaatgccccacttgggatacccaaatagaaggaagaaaaattttgctctacaataaagccctaaggtgctgtaagagtaggaatccctcagaaaccaaaagattgattcacaatcatgttattgatgtatagatataaattacaaacaccaatatgtattcatgatatgtgtgtgtgtgtgtgtgtgtgtgtgtgtgtgtgtggacacatgggtatgcatgatacatctatagatgaaaaaatatcctctatagaataaactgaagcaaagagtacatcaaaagatcatacacgatgaccaagtgatattcatttcatcattacaaggatgcaaggctagttgggtggatgccaatcaataagtgtgatatcacatcaccagaatacacagaaacagcacaggtcattgtcatcaatgcagaggagacagtgcttgtcaaaattcatcatcccttcaagatcaaaaaatcaacaaatttaggcatagaaggaaaattacttctactcaatgaagtcaacgtgtcagactcgtagttaacaactgtaaaggggagagttagaaagattttcctctatgatctggaataaaagaaggcaccctgttcttactatttgtagtcagcatagcatagaagtcttaacttgaacaattaaaccagaaaaagctcggaaagaaggaagttaagctgatcctggttgctgatgacaggcttatggttaaaaacaaaaacctttaatggaatactcaataaatatttcacagagttgcaaatgaatttaatagagccccaggacataaaatcaacacacaaaattagtagcatttctacatattgatgcaaagctatctgaaaaataaagaaagcaatctcaaatataatagctaccaaaaatgactaggaatacatttaactaaagtggtaaaaaaaaacctctacaacaaaacaaaacagcagaacattggtaaaaagcaattgaagaagacagaaagctggaaatgaagctcatgctcttgaattggaataattaatatcattaatattgttaaaatgtccacaggacccagagtgtgaggcccaaattttaatcctgttcttcgtagaaatgcaatgaacacaacacattcgtatggcctagaaaaaaaacctgaataatcaaagcaaccttaatcaaagttactaacagctcagtgagccccactatatgactccagatccatagtaaccaaacagcaaggttctcacatcaaaccagacagagacaacagagcggagtggagagcccagaaatagacttaggtgcttacagctaaatgatttgtgacaaatgtatgaaggacccatggaagtgagggcagcttcctcagccaagagaaactagacacacacacacacacacacacacacacacacacacacacttgaattagttcctcatctttaactatacacaaaacctaggtcaaaattgatagagagcttaaaagtgagaccctcaaacaataaaaccatatagaagaaaatacaagttatttacctaagcaagaatgtttcaggacactcccaaccaaatgcaggccaaattgatcatgtcaaattagggaatgtctgtgtggtagaggaaacaacagagagataacctgtggaatggagaaaatatttaagaatgtattagtcagggttctctagagtcacagaacttatggatagtctctatatagtaaaggaatttattgatgacttacagtcggcagcccaattcccaacaatggttcagtcatagctgtgaatggaagtccaaggatatagcagttactcagtctcacacagcaagcaggcgaaggagcaagagcaagacccccttcttccaatgtccttatattgtctccagcagaaggtgtagcccagattaaaggtgtgttccaccacacctttaatcccagatgaccttgaactcggagatttaatcttctggaatccatagccactatgcctcaagatctccataccaagatccagatcagaaacttctatctccaagcctccaggtaacagtcactggtgagccttccaattctggattgtaattcattccaaatatagtcaagttgacaaacaggaatagccactacaaagaattacattttcacaaagagaaaagatggccaatgcttagctgaatagcaataaataaataagaaccctaattaaacatagcaaatgagggctggaagatggctcagtggatgagtcacttggcactccagcaagaagactggagttggcatcttcagaactcctttgaaagccaggcagttgctctggccacctataattcctgggcccaggaggcaggaacagcagaatcactgcaacaagctgacagctagatgctgttgtctaaacaataaatgccccccataggcttctatatgagaacacttggtcccagttagtggcactgtttaggaagattatagagccattatgtcctaaagtttaggaggtgaagtggtcactgggagtgggctttgaagaatgactattatggaaaatgctggaagataacaagtgttggttagaatgtgggaagggagggacctctgtatgttgttgctaggaaagtaaataaatgagtgcagtcattaaggaaaacagggggtactggttagttcatattgttcttccacctatagggttgcagaccccttcagctccttgggtactttctctagctcctaggatgaggatcttaaagcccacacccagtgacacacttcctccaacaaggccacacctccaaatagtgccaattcctggatcaagcatattcaaaacaccacagagaggttcctagtaccttaaccctcaggaaatgcatactcaccctgaaaatcccttcccactctccaaggtttatatagcccttattcaccccaagtaaaatatatgtgcaagccatttcaataaattctgtctaaaagagctgtaacactgaaatccttgtagaaggccccctctccccagccaaacccacagaccaagagcctgctgacgtactgaaccacaacattggttaaaggtatagaattagagctagaaaaaggaagtgaatttttaagagattagttaataatgatacattgtattcttcaaaaatgtaaagagtgtgggtgttatatggttttaccatgggagtaataaccacgtgaggtggtgtgtttgttaattagcattgttgtatctctgtgtgtatatacttaagaataagttgtacatgataaaatcatatgctatctgccaattttagaagtgtgtttaaaggactggagggatggcacagtggttaagagcatttgctgctcttgtagaggactggaatttggttcccagaactcacatggtggcttataactgcctgtaactccagttcaaggggatccaatgccctcttctggcttccctgggtaccaggcatgcatatggtgcacatggggacattcaggctaagcagtcatatacataaaataaaagtaaatgcatttttaagaaagaaagaatgaagtcccactgagggtagggagttgtttggtttggttaatgtttttagggctggggtggtggctcactgttcagcacattgttcttgaagagggtacagctccggttctcagcacccatgttgggtgcctcacagctgcctgcaactccagctccgtgggatctagtctcttctggcttctgtggacacctgctgtggtgtatacacacacacacacacacacacacacacacacacacaccaaacaaattttaaaaggaaggaaattgaaattaaaaaaaagaaaaaaaaaggaagtaagaaaggaaagggaggaatcaaataagagaggtgagaaaaggagaaaaacaggaaacaagactcttgaaataaaggggaagaggaaacgatacaagagtgtgtgtgtgctggggcgttgtaaagtaaatgaacagataggggaacccagacaagtgggaattttgacttatacaaaaaaggaagtgagaaatgtaaagcgtctgagggtgaagagaaatctgggtgtgagccatgggaaaagggaagtgagaactgagagagggggagatccggtacagtggacactcagggtacagcggatacagagggtacagcgggtgggaaaagggaagtgagaagtgagaactgagagaggggtgatccggtacagcggacactcagggtacagcgggtgggaaaagggaagtgagaactgaggggaaatttggtacatcgcttagggcgggtgcggtgggtgggagacgggaagtgagaaatgttaaagctatgggggaggcaaggaagccaggtgtgagccatgggaaaagggaagtgagaactgagaaatgagaaagggggttatcctgtacagtgggtatggccagtatggaggatgggaaaggggaagtgaggatgtaagataaataagggggaatccagataagccagaaatctgaaatttaaaaaaaaaaaaaaagaggaaatgagaaatgtgagaaaggaaacaaaccagatgaaaaagggaagcaggacagaggagcggcagagaggccttggcaggagaaaagttcccaggccagagatatgccacactccactcacgttggcctggacctgaacctacgtgctccagggccagttctttatgggaggagactgacagcacttaggtaactgtgaattgctaccttagaaataggattttaagaagtgaaaaagaggaagaggaagtggaggaagaggaggaagggaagggaggagaggagggaaaggaagagaaggaaggaggcagggaaagacaggaggaggaagctagaaagtgtgagttgacagagcagagcagttggtcaatgtagaatttttaacctgccttccagtactcttcagcgtttgggggggggggtggttcagggtggagggaggcattgttctcttgcaggagtaagccactagtagaattctgaagagtttgaaaacaaagcatattggtgtgattagttgaaatcttttggttaaaaatgaaataaccatttgtcaatgttttatcaacaatgaagacaatacccaaaattgtatgtgtgacctcaaagctaatgtgatatattgataatatgatataatgtgatatattgaaattattctgagtaagagatacattgttacttttttcctcttcaatgatctgtgcttttaattttaagggaactaattttcccatgtaatgatgtcattgcaaattaaaacacttttttcttctttctctcccttctctcctcctcttcctctgcaacagggttacatgatggaaaccagaatctcagacctgaaatgtgacacagatgtgtttgtaacctttgaaggtgacaatgtggtcatgcttcaggtaagggttaggacacagttattcattttaaacagcacacttttcaagaccaagaattatccaaaaaatctgaagtgttttgtacgttttatctttatctgataccttcatttaattggcaggtgttttcctgttaggcagttgaacaggggattggggtatttgtcttttaggtcatctttgatgtttaaatatgtctttgtagttttagaaaaccactagcatgtactaagtcagatttttatactagcaaagctattccaatagagtattcaggccctgaagataaaacgtgaaaaacagaatgctaaactccaaagtatggggtggccagtcaacacagaaatgcatattaggacaaattgggactcattgttggcgaaagtagaagagggtttgcatgttgctataggactatgtgtaattctaccccaggactctaccctaataatcataaatatggaataaaaaacactgaagcaatacattctcaccactacataatttattatagcaataagtatcaatagcaaaatgattatgtaaatcgtactctgaccactcagtggggaattatatatcacctttaaaattgtacttgcaagcagttctgcttctaacagaaatgtaaaacgtatggtaagtaaaatgatatgaaattgcacacaagatataattgttgtgtttttaagagaataacagaggctggacgactcagggcataaagtgcttgctacacagctgtggtcactcaggtttagagcctcggaatccatataaaaagctgggcagttgtgacagctgcctgtagtcccagcacacgggagacagatctgacttccatgggacaagcaggctggccaaactagacaaaagggaaagctctgggttcagtgaaagaacctgcctcaatatagacagtgaagagcaataatgaaagacacttgacatcaacctcaggcatccacacgcacgtgtgcacttgcacatacacgcatctgcaacaaaacaaaaggaacaaaaccaacagacgaatagtggggcttgtggtctgtcagtggaatcgccacctcttctccagttatccctcttaataattccacatcctggacaatacccagcaaacaaacaggatgggactgaaagggataataaagataccagcctcctaggggccttagaactagagaaatgaaaaggcaattacttgttcaggtttctaagaagcatggacaaaatacattccaaaatgaaagctgttcctatagcctaagaaccagaaacacagtggcctaagagtggaaaaacttgacaatgtctgctttgaatcagttaggcacaaggaaatgagaccctaactatattagtcagggtttttctgctatggacaaacaccatgaccaaggcaacttttataaggacaacatttcattgggactggcttgcaggtttagaggttcaatccattatcaccatttgggagaatggcagcatccatgcagaagtggcgctggaggagctaagagttctacatcttaatccaaaggaagtcaggagcaaactgtcctcaggtagctgagaggagagtctcaaaacccactcccacagtgacacatgtcctctaacaaggccacacctcctaacaatgccactccctagccaagcatatttaaaccaccacattccactcccaggctcccataggcttgagtctatggacaccatacctaggcatagcataatgcaacagtacctttagtacaacttcaaaaatttcatagtctatcatagtctctacaatattaaaactccaaagttcaaagtctcttctgaaattcatgcagtctcttaactgtaatcccttaagaaatcaaagttaaaaagcagatcacatacttccaacatcacaggatatacattaccactccaaaatgtcatagtaagaaaatactggaccaaaggggtaaacttcaaattcttcatctccatgtctaatgtccaactcctttcatctttgctgactgcaacaaacttttttctcttggactgattccactccctattggcagatttccttagcaggtatcccacaactttgtcatctctaacatcttgagttttccaagactatttcaacttcagagcttcttgttccagtgtctgcgatcagtacacaatcttctgtattcttaaaagggttcgtttgggtcacttctccagctctgacctctttagcactctaggctctggttaagtctactccactgctgctgctgttcttggtgatcatcccatggtactggaatctccaatatactgggatcttctgctgcaactaggcttcaccaatagcctctcataaactcccttcatggtgccaagcctcagtttctttgcatgaccccttgtgtcctggaccatcaattgcaactgaggctgcacctttaccaatagccttccctggcctctcacagtgtcaagcctcagctgctctccatgacacctttatgtcttcaaaaccaccacctgtgtgactctcatgccttacaaagtccagctgtaccacaaggtataaccttggctatctttggagcacagcttctttgtgctctcagaaatcacttcctagatttcaccgcagtgatgctggtctcttcttaatcaccactaatttcttagcttcagctaaccagcgttaattgttccagtagccacttctgttcctgactctaaagtcagagccacatggccccttgttctactacattatcaccagctttctgtttttcagctccttcaactgtctaagcttggctgtcctgaaacttgctctgtagactaacctttaactctctgagttcttctgagtctcctgagttctgggattaaaggaatatatcaccatgcctaggcttaagctttttctactttgaacttgctctgtaccaggctggccttgaactcagagatctgcttgcctctgtctcctgggattaaaagtgtgtaccaccatgtctggacctaagctttgcatggccactattcctcaagttctagatcaaaagcccatgtcctacagcctcaagatctggatgacagttgtgctctccatttctggattgtagttcatttcagatcaaaagtccaaatgcaaacagtagccaggtcataataatgcttagatataactatgccttcttcaactgcaaacgcataagtgtagctgggtgggatcttgccccaaggtcaccgctcccttaattccatttaatatccttaaacacaggacttagcttctttccacctcctggagcccctttactcttagaaccgtacattgtgttcacagcttaccattcttcattaagaatgaactttagtaaccacacaatagaattaataccaggctgtttagagattttctttgtcaaagcaagtaatctaaatctcttcaccttagcttcaggcagactccaaccaatggcagcaagcagccacattcttcaccaaaatagcacaaaacagtctctaggccacatactaaaatctcccccccacacacacacctcttgagctaggttgccacagttcaaaacacctccagaaacagtcttccaagctagtatggcccattaagccctacttaaagcattcagtagctttggaaaatccccattcctccaaacaaaagcaaatgcagcaacaccccaggacctggtcccaatttctgttttagttagggttttactgctgtgaacagacaccatgaccaaggcaactcttataaaggacaacttttagttggggctgtcttacaggttcagaggttcagtctattatcatcaaggtgggaacataacagtgtttaggcagatatggtgcaggaggagctgagaattctacatcttgatccaaaggaagctaggagcagattgtcctcaggtaaataggaggaagatcttaaagccacacccacagtgacacacttcctccaacaaggccacacctaatagtgccactcactccctggtcaagcatattcaaactaccacagtaatccttctaattccactcactaatcatttcagtgggttccaatggagctgttgtatatgtcccannnnnnnnnnnnnnnnnnnnctcaccagcccgatttcactttatcttcaacaacctatcaaattagggactcatcaaagaactaatccattgatttgttcagagtcctcatggaccgatcacttccaaagcctcccaagtggcaaacaagccttgagcacatgtcctcaggtggtatttttagattccaaccacagttcttgtccctctcctccccccccaaagcagttgatagggagttgagccccagcgtcacttggtctcagaagagtgaaatgttgggaagcagaactcaactctctccttccctggccttagtgagaagcagagaggctaagcccctatcttcacccagcatcaacaatcaacttaatgaggtggcagaaaacaggacaacttgacattctgcctcctccttcccatgcccaggcaggataaattagtggcccatttttgttaggacaatattggacaaatgcagagaaaagaggaacatacttacacagaatctttggaaactcagaatgaaacaggatctcattataacatctgaataacctggatacaagagtgaaaaaaaaaaaaaaaaagagcctcactcatcctatgacaggccaggaatataatgaaggaaattagaaatagcaacagatgatgaaggaaaagaatcagatgctgaattttatggcaaggatttaaaactggccaccatttaaaaaaaaatgcttctgtgataataaaatgtcttccaaacaaacacaaagcaaaaagaatccctgcaaagaaataaaaaaataatttaaaggattaaatgtcaattatagaactgaaaataacagtaactgaaataccagggttacagaatagtctctgtcatatgagaagacccagagtggagtcagtgaacttggtgactgatcaatagaatataggttttacatttgagagaaaatagagaatacttacctttatgtgtccatctaattttagtaaacaacataacccattttcctaaccccccaaaaaactgatttaattcttacatatggctaaatcctatattattgtgtactgtgacatacttagatcaaacgtcaaatctcagaggaacttaaaaaaaatataggactgagtggcagtgaggcacagatagagtgatcccatgagggaaatggggcaagtccctggggcatttttgtgaaatgtgcccagacaactgggggtggggccacgcctgagcagatgatcttgagttatattaagaaagcaggctgagcaaaccaagaggagcaagcctttaagcaatgttccttcatgatctctgcatcagttcctgcctcttagtcctgccctgacttactttcctttgtgatggaaagtaaagctgtaaagaagaaaaaaaatcagccctttcttccccacattgtttttgctaatgatgtttatcacagcagtagaaaataagctaagataaaaaacaaggacaggaaatcagaaagacccagtcaccagcaccaggaatgacagaggatgtgtggtcagggaatttgcagccattgaaagaccagtaagggagaagctttgtgaatctgacagctcaggaagaaaggaccaattcttcaaaagccaccaactgttcaaatttattaaagttaaaatagagtactcaagtagttctatactgttacagaaattaattttttagtaatgattttaaaacctctgaaaaataatttgtaggcctgagcttgattagaaactccaatggtcaattaagaaattttacaaaatttcttctggaaaacgagagaattcttattttcacaacttatttcaggaggctggaattattctgatacccaacagacagacagtataaaggagtcaaaactatagaccaatgccgctcatcagcttagacagcaaaagtctcagcaaaatgttaataaattaaatctagcaatgtgtaaatgaagtatatactgcaacctagtgagattcattcctgatgtgcaaagatgttttaaaactcaaaaatgagatcagtgcaattctttttatcagtgaaataaaggagagaggccatatgatcatattagtttacacagaaagagcaattgagcccttccagtcggtgccagctccaggcaaccttgggcaaaaactcagcggatggtgacatccccagacgactctccacactgcaggaaccctagctcgcccacaatcttaggatcactggtgagtggaacacaacatctgttccaaaccaaacagccctgtgacaacaggagcaaggacgcaggagctctgcctgaccagcggctcgagttccttctgatcagtgctgctataccttggatttgaacgcactagacagccccactgtccccagaggagacaccactttcaggagctgtaacacgcccatgatcttaggatttcaggatcccaagataccaggagcttgatcacaccaggatctcagggtctcagaggaagcttgactgccaagaactctgaaacacccagagtctcaggttcacaggatcccggaatcacagaatcacagagaaagctggactctgaggagtcctgaatcaaccaggattataggaaggacaggctccagtcagatatattgagggcaacaagcacttgagataatcagatggagatggcaggaggcaagcataagaacagatgcaatagaaatcaaggttacttggcatcatcagaaccaaactctcccaccatagtaagtcctggatacaccatcacaccagaaaagcaagatatggatctaaagtcacttttcatgatgatgatggaggactttaagaaggaaataaataactcccttaaagaaatacaggagaacacaggtaaacagcaagaagcccttaaagaggaaatacaaaaatcccttaaagagttacaggaaaacactaccaaacaggtgaaagaattgaacaaaaccatccaggatctaaaaatggaagcagaaacaataaagaaatcacaaagggagacaactctggaaatagaaatcctaggaaagaaaccaggaaccatagatgtgggcatcagcaacagaatacaagagatggaagagagaatctcaggtgcagaagaaaacatggacacaacaatgaaagaaaatgcaaaatgcaaaaagatcctaactcaaaacatccagaaaatccaggacacaatgagaagaccaaacctaaggataataggtatagatgagaatgaagatttttcaacttaaagggccagtaaatatcttcaacaaaagtatagaagaaaatgtccctaacctaaagagagagagatccatgaacatacaagaagcctacagaactccaaatagactggaccagaaaagaaattcctcctgtcacataataatcagaacaacaaatgcactaaagatagaatattaaaagcagtaagggaaaaaggtcaagtaacatataaaggcagacctatcagaattacaccagacttctcagagactatgaaagccagaagatcctggacagatgttatacagaccctaagagaacacaaatgccagcccaggctactatacccagcaaaattctcaattaccatagatggagaaaccaaagtattccatgacaaaaccaaattcacacaatatctttccatgaatccagcccttcaaaggataataaagggaaaacttcaatacaaggagggaaatgacaccctagaaaaagcaagaaagtaattcttcaacaaacataaatgaagatagccacaagaacagaatcccaaatctaacaaccaaaataacagaaagtaacaattgcttttccttaatatttcttaatatcagtggactcaattctccaataaaaagacatagactaacagactggctatataaacagacccaacattttgctgcatacaggaaacccacctcagagataaagacagacactacctcagagtgaaaggctggaaaacaattttctaagcaaatggtctgaagagtagccattctactatcgaataaaatcaacttccaacccaaagtttaaaaaaaaaaaaaaaaaaaaaagaggggcacttcatactcatcaaaggtaaaatcttccaagatgaactctcaattctgaatatctatgctccaaatacaagggcatccacattcattaaagaaactttagtaaagctcaaagcacacgttacactgcacacaataatagtgggagactttaataccctactctcgtcaatggacagatcctggaaacagaaactaaacagagacacagtgaaactaacagaagttatgaaacaaatgtatttaacagatatctacagaacattttatcctaaaacaaaaggatataccttcttcgaagaagatctcagaagatggaaagatctcccatgctcatgaattggcaggattaatatagtaaaaatggccatcttgccgaaggcaatctacagattcaaggcaatccacaccaaaattccaactcaattctccacggagttagaggtggcaatctgcaaattcatctgggataacaaaaaacctaggacagcaaaaactattctcaacaataaaagaacctctggtggaatcaccatgcctgacctcacgctgtactacagagcaattgtgataaaaactgcatggtacgggtacagtgacagacaggtagatcaatggaataaaattgaagacccagaaatgaacccacacacctatggtcacttgatatttgacaagggagctaaaactatccagtggaaaaaggacagcattttcacaaatggtgctggcacaactggtggttatcatatagaagaatgcgaattgatccattctttctttttttttttctttttctttttctaaaaatctttcttttttatttttttattagatattttctttatatatatttcaaatgctgtcctgaaagttccctatacccttcccccagccctgctccccaaattgatccattcttatctccttgtacaaagctcaagtctaagtggatcaaggagctccacataaaatcagagacactgaaacttgtagaggagaaagtggggaaaagcctcgaagatatgggcatagtggaaaagaggtctgaagccccataggaggaacatcaatatgaactaaccagtacccccagagctccttggaactataccaccaatcaaaaaaaaaaaaaaaatgatgggactcatgactctagctgcatatgtagcagaggatggtctagtcggtcatcaatgggaggagaggccctaggtcctgtgaaggctctatgccccagttcaggggaataccaggaccaggaatgggagtgggtgggttggggagcagggggagggggaggggataggggattttcagagggaaaattaggaaaggggataacatttgaaatgtaaataaagaaaatatctaaaaaaataaaaaaaagaaaagaaaaaaaaagagcaatcaaccatattcaactgccttttgtaataaaacttgcagcaaactggaaagggggtatgtcttacacataataaaaagaatctacaaatatcacactaaacacaattaatggtgaatgatgggagaatttcaaggtcaaggagaaccgagagaactttctctgtcactgtgacccaggacatcactgtatcaagggaaaacataggcaatgcaataaggcaacaaaaatgaaggcatggagccttaaaggagtagacaacacctttgtagattacaggtttgtaaacactgaaaaattacagaaagtctataataatttgttgagttcagcaagatctcaggacatacaaaaactaatttttcttctacatactaataatgagcaagctagaaactcaaatttaaaatgtagcatttattgtttttcaaaggaaaatgtaatatcttggtataaatctagcagaacatgaataaggtttatgtgctcaaaatcacaagttttcccaaaagaagacctaaataaatataaatgataaaatatagaagagttttaaaagaaaattaatgactggaaatgtagcttagttggtagagttctcacctggtatgcccgaagctctagatctaatcctagcatgggcacagtgtgaacacttggagtctcctgggcatgggcacagtgtgaacacctgtgctcaggagagacatggcgacaggagggtcagaagttcaaagtcactcttagcttaagcagtaagttagaggacagcctaagctacaagagacttgtctcaacacaaaataaagatgggaaaattcacaagtcctctaacactggaaaaagtcgtagacttgacatcaaaagcataattcatacaagaaaaagataggtaaaatgaaactatggtctctgattgatttccaggagtggggagttatttctgttccccagtttcctaaaatttccctatttcaattagcagcatccaagtaggacccagtggagggagcattcgcctcacaattgggcaattctcacattctaaaggagctgtgctttggccgatgcagccagccagcaccacctccccagccattacctagggatggcctctggagaccactcagcttggaaactctggcacacagcagggcatgccgcaggtgtctttctggggtatgttgactgatgcaagctggctggctgacccctctccagcgtcataagtctggtatcacccacagtgctttcagctcacttacttaaagatgacactcccagttctacagatgtcaggtggctgttccacagctaatatgtgcttcagagtgtactttccattttccctttgagcaagatggtaggtttcctgacccttccgatattttctagggcagaggttttaggctcttgatgaaattcaattacaccctccaccaaatccaattatgatctgaatccatgaaatcccattagaacttgcttttgcctcattagatatacacggagacagatccctgcctaatccaccctggcacatttcctaaataatggcatccagagactttgcatatattgtttattaccctgaagtgcaaatatgcaaaacatgcaaatgagccccagggaacttgcttaaagccccagctggggtggggagggggttaggggtggcattctggtgctacctggctggagtgacttgtgtttctagagactctgtataggagctgctgattagaaggctgtctgttcataggtgagaagcctggcaatgcctgctgcgagtcctctgatccacaagaacacagatttctccaagcaagagagaagtggcttgctgtagctcagggctgctttcctctagattattccccctgagcctagatttcagattcattcagcacagggttggggacaggcttttgccccactgtctagggacagcagttttccttccctggctgaagtggtctatgctgtaaataacaggatttcactttcttttatagctgaaccccattgtatacataaaactcattttctttgtccacttgtctattgatggacacagaggttgagtccatggttagctattatgaatggtgctgcagtaaacacaggcatacagtgtttctttggtatgctggcttcattactggataaatacccagaaaggggatagttagatcatatggtcattctatttttggctttttgaagagccttgtggtctgtagagcctgtgtgaagatggcttttttttctttaccatccaccaggatttttcctgttttattttactatcagctactctgaatggtgcaataataccacactatagtttatttgtctctcccgatggctaacgattttgaatgtttcatgtatttgttgactgctactatttcttctaagaagtgtctgttttaaagttgagttgtttggttcatcctgtgagtttcttataccgtctagatgctaaccctttgtccactggtaaatgtcccctctcaaatgtcctctcccattctgccggccatctgttacgttggtgcttgttccttttgcactttagagtgctccccttatagtttattctgtaccttcacagcttccgaggcgtacatttaaatctttgatccggtttgtgttgatttttgtatgggagcgagccaggggctaccctatccccatttgtagatgatgttccttgtacagaaaggcccaaggacaccatcaaaggtgtaacaggactgacaaacttagtaaagctcatgatataaaaccaacacgcaaagctctagcattttataggtctaatgtacaaatgacaatatttctgaaaaagaaatcatgaaagcaggcttattaaaatagccaaaaacataaaaataaagtacacaggaataacaattgaaccaaagaaagacctttaccgtagaaatcgctaggtgccaatgaatgaaaatgaagaagatgtagaaactagaaagaatggtcctgctggtgtgctggaataattagtactgttaaatgtccatagagctcaaagaatttacaggttcatagaaatctccaccaaagtagtccaaagaactctaaagacaaaacaaaacaaaccccccaaacaaacaaaaaccaaaaaaacaaacaaaaccacactgaaattcatgtgcaagaaatctcgagcacaatgcatctatcactatacctaatttcataagtaacacaacagcatggtatatgcagaaagccagggttagaaggcagaaagccagaaataaatccagacatctgcaactgacagagacaccacagaaaacacagcagcctcttaggtaaatgaggaaagtaggtagctgggnnnnnnnnnnnnnnnnnnnnttagatcatatggtcattctatttttggctttttgaagagccttgtggtctgtagagcctgtgtgaagatggcttttttctttaccatccaccaggatttttcctgtttggttttactatcagctactctgaatggggcaataataccacactatagtttatttgtctttcccgatggctaacgattttgagtgtttcatgtgccatagagctcaaagaatttaaaggttcatagaaatctccaccaatgtagtccaaagaactctaaagacaaaacaaaacaaaccccccaaacaaacaaaaaccaaaaaaacaaacaaaaccacactgaaattcatgtgcaagaaatctcgagcacaatgcatctatcactatacctaatttcataagtaacacaacagcatggtatatgcagaaagccagggttagaaggcagaaagccagaaataaatccagacatctgcaactgacagagacaccacagaaaacacagcagcctcttaggtaaatgaggaaagtaggtagctgggcacacagaagaacttataagacaatggcttcctgagccagcccaagaggactctgtaaagaaattcccaggcagctgtaatgcagcaagcccaggacacatccagtccaagagagcacaggaaaggtgtgagatcaaaaggatggcttcaaacaagaagtggtttctgtttaacaaagagcattggagcatgaataagaaacaggaagaacttagtaatgtcatagggaaaatgtatgcttcctcttgaacagagggagagagacagagacagagacagagagagagagagagagagagagagagagagagagagagagagagaatttcactgagacaccaggacaaacaggctacaatgaagcacactgaagagcacacaagaatctatttgactttagcacctacatgcttctactggtttgacaaaaactattgaagaattgtcatttctgcaaagcattgagtagaagccttttactttttacataatacttttagtttattttatgtgattttgaatttttaagactcaagtatacttgaactatagtccctctctggacatgactatcatggtcaggaactcatagcagctgtgcttgcctacacaaagcctgcacaaagcctattcgagatggagccagctaaaacttcagcatagatgggacgaatggtcccaccactaaagggggagctatttctggctatgggtagtatggaatcattcctttttgaggttgtggcttcaggtgggtttctcattttccagtggatggccccacttttatgcacatatgggcagtacaaactggacttagcaggttatcaaaaacaaaaacaaaaacaaaatcaaagcacacacacaaaaccaaacccagaaaagaaagacatgaatttggcaaggcacaagttggggaaacatggaggattagagatagaaatgaaggggtggatatatttcagaaatatattcttaaaaatcaagaaaaaatttaaagatagttttcccttgaagcataaaaagtaataaggactgctatatatatatatatatatatatatatatatatatatattccatcatttatctactaataacctatcacctatctcttatctatcatctctcatctatttacttatctcctatctatcatctgtcttttatctatatatcagctatctctgtgtctgtctgtctatctatctatctatctatctatctatctatctatctatctatctatctaatctatccatcttttagccttactcttctcccatagcagaaagaatttgaaaatttccccaggtaagtaagacacaatgaactggaatacaatccttgaggccatcctgaagtggcaacaagggctgtaccttggtctgaagtttttgggtctcccctctgttctagagagaacactgtaatgaaccagagagcaatctcacagaccctggctttggttgagttcaacggctagtaggtgatgttgagggacccaacatcagggcaagcatgtgcccaaaatcagaaatgcaggtgggattagctcaatcacatagtgcatctgaagggatgagatctggttggcaacaggatctcggccaagtggccactgctgtgagtcatacctcctgttttcctggaagatcagctgcctgcctgctggaaagccaagggtctgcctgacctacagagctgggggtagggtgggaagatagttcaagagccttccctaaaacctacaaatagaaggcatcctagcattacacatagcataataacaacaacagaaacttgggagtagataagaggtatggaataagagatatgtaaaatgaggccacacagctggttaatggaggcggtgagggccatgatgggatagggcagccaaaactgtgcctgggaccaaggtatacacttcagaacaatgatggagcccaagccagggtagtgtctcggacacatataaggattatctccaagatcaatttggggttagggttgatctcaagcaattccaaatgtgatcatcctctctggaaagtggagagactttggagcaatttttaaaaagctgaccaaggtagtttgaataggcgttgtttttctctttccaagtccattgacccatgcacaaagctggcacccagttttcaaaaccagatgtttcatcatctaaatatttaaagctcccttcaagggctcacatgtgtgcactcttggaggaaggaagccttccaaatccaagccactcttttatctttgcttctctgttctccagagaaatcccttcatttttctgcacagattgtaacggtttcacagtgaggttgactttagcattgttgtccaagtgatgctggtgggtctttgacaagaatgtgttaattgtgtattttaattttgatgataatctaaacagaatagtccaagtagggtatgtcaactgttagaataacaaccctacaactaggaactcacatgagcatccatcagcctttgtctttgtatagtggttccctcccatccacaagacctcccctgatccatggggtgaacatcttgagacacttagtcagtgcctgaagtcatgagtagtacacggggaaccaaaccttggctatgctgtttgttcctggacacacacatctgtgatgagatttcatttatacattaggttcagctaaaaataataatagcacaatagtagctattatcaaaacttaagactgtctctggaatctttgacttaatcttttctgcagacttaaccatgagtaactgagacctcagacagtaccttgtgaataagggaggactggagaatttgtaaactctctgtaccaagccccaacctttgtcactagaaaccagtgaggagagaaaacatgtaggctccgtgttagtgaaaaaaataagtgtttgtgctgagcaaaagccaaggggggtggggtgcatggtgtgctgctatagaaagggtgaggtgaggggcctcttccccagtcagcagagccaagagcaaattgtgtggggttctgccacatttaggagggccaagttcctgccacaatgtgttctatgccttgctattggagccgctgatgtgagattcattggtgcttgtaatgtggcttgtatttaattttatcgtttatagttggacagatctataaacataaggtgtttatatctagttttatatttgagtacgtttaagtaacataatttgaaacaagctaagtcaacattgcaagggactttttttccccccttcaagaaggtttccacattactcaagttgaagaaaacttgaaaggactcgttttttagcaacctccctggtgttatttatttattttgtcacagatattaagtcttgtttgcttttcattttcagtaataaaaattgtacacatgtaatgttggagctgtggtcatggccaggtcctgggtctgaggaggggactgacatatggccatggacacgaacacaggaacctgatgaaggcgagggacagacccacaggagacatttgagatgtggtgggggtgaggatagggaaacagtggtttgggaggggctctcatttgctttggagaatttggtcttaactagttgttagtggggttattgatcagtacatggttcttggaagtgtggctaaactgtcagcacacctgtcattctccatggtgacctcaggccagctctatagcccatctgctctcaaagcctgaccttctttcccagaagttggcttcactgaactgaccctgtagttgttcctgggtctcaaagcagccacctcaaatctggagaagggcagaaccttaggaagcactctgcccccaaccctccatgaatcctccagctggacttctctatggtctttttggccagtcatagtgcacacatctgaacttggagatttggctgcgcagacctctcaataggaaagggtttggacccaaactgaagatccgtggggtatggaggcattgcatcagctgtttgcagagcagacctgctcctgaactggcctccatggcacagggtgaactgaccggacacaccaagtgggtccttttgggtaataacataactggcagaactgggggcaggaaggaccccactccgccagtttctgtgagtcatcagaagataactaagcagtaatctctaccttcagggccaggtgggtcctttaacaactgcagcagtcccagggtgctcggagcgtggtaaggatttagataatctgaggtcctttttcctcttcccagggcctacagctgctgcttagctctcactggtagttgtcctggggaatgtggatacaagtgttccagaattttcagtttttcaaatggcaagcacagtatttttaatgtggaatggctggcatggtggtatcaaaccaagcttatctaccaggagggatgtgagccatccacatagtaggcacaggcccttggctcccaaacaattctccaggatgtttctgctctgaacagtagctctgggtactaatggaaaaggttggtggttccttggggagggcaaaggaccaggattgagcttcacaagttactgtccttaggtccatgatattcccaagagatggcctctatcatctgcaagttccctggattgcgcgtaactataagaagctgcagagtgggggtggggtggggagttctggaggaatgatgctcacttaggatagacagatgggctctgttttattcacactgtgaaatctctggcttggcctttgcctagagagtgggcggggggggggggcatcacctgaaatatacataggattgtatgtgtgtgtattatgttctgtgttgccatagacacctaggtcacagcatgaatgcaattataatgtactgtggccatcctgtacatataagccccatgtttgtccccctacacccaagatggctttggtttttatacagtgagctgggttggtcaccagtcattagttaatgccgttctctggcaaggaacagtccaagcacataccatgaaggggagttgggtgtggccctgctgtaatagttaaaataggacctgcatgctgtggtggggctcaaactgtactgccatgcatgtgaggaaccgaagagggagagggggaaggaaggaaagggcctgtctgtctgtctgtctgtcccctactgccatacagcactttccaacagacctgcacacatggaggcatcaaatcataactgccatggtgcactttcagagtctgcatcagaagccccagtagggaacagccacgggctttcccagcagcctctctgccttctgaggcattcttcctcccacagccctggaagtcatatttcctgccctgtcctgggctttagcgagtgacaccgaggcagtagcacggaccactcgcagaagggcagaagaaccccacttggttttctgttctctcctcactccttttaactttgctcttgcagcatgatgtgggcccctgaagccacaagcacttccgccttgcttgactctattgctaagcacggtgcagaccccagtgtgaccccaccgcccgcctgccgccttgcctgcccgccgcctgcctgtccctcccttctccctatggggttatctagaagtttctccttagactcatattttctattctaattggctcaaatgtttctgtcttggcagcaaaccttcccagtaagactttttactccaagttcgcagtacctggcaagaatcagtgaaatctttagcatgtggaaatgcaaagttgattcacagatgccttgaaaaacgatttgacctaaacacacacacacacacacacacacacaaaacaacaacaacaacaacaacaaaaaacaaaacccaaacccttatattggtgttacacaatctgtgttccaggatgcatgcgatatttattatatgtgtgtttctgatgtgtgtttctgtacagtttctcacactcaaagtcttcaatgttggctacagattagcttaattcctcttgcaaatgggtcctggtttttgttgctgttttggagttttttgtttttgttttaagaaaaaaaaaaaacctggtatctttgctgactatgcaatcactaagaaaggactcttgggtaggcaagaaaagagggtactcacatgcagaaccagagacctgtataaattgccacagacacagtccttaaacagaaattgtatcacaacctcccttaaggagatttggtataaggataacaccagacttggataatttttttaaaaaaatgtatgaaagaatatattttaaataatgaaatctctactataaagaaaattctgctgaataaatgttgcagaatttcctggatttgagatgcacttgtgttatacctgaggtccattcaggggtgnnnnnnnnnnnnnnnnnnnnnnnnnnnnnnnnnnnnnnnnnnnnnnnnnnnnnnnnnnnnnnnnnnnnnnnnnnnnnnnnnnnnnnnnnnnnnnnnnnnnnnnnnnnnnnnnnnnnnnnnnnnnnnnnnnnnnnnnnnnnnnnnnnnnnnnnnnnnnnnnnnnnnnnnnnnnnnnnnnnnnnnnnnnnnnnnnnnnnnnnnnnnnnnnnnnnnnnnnnnnnnnnnnnnnnnnnnnnnnnnnnnnnnnnnnnnnnnnnnnnnnnnnnnnnnnnnnnnnnnnnnnnnnnnnnnnnnnnnnnnnnnnnnnnnnnnnnnnnnnnnnnnnnnnnnnnnnnnnnnnnnnnnnnnnnnnnnnnnnnnnnnnnnnnnnnnnnnnnnnnnnnnnnnnnnnnnnnnnnnnnnnnnnnnnnnnnnnnnnnnnnnnnnnnnnnnnnnnnnnnnnnnnnnnnnnnnnnnnnnnnnnnnnnnnnnnnnnnnnnnnnnnnnnnnnnnnnnnnnnnnnnnnnnnnnnnnnnnnnnnnnnnnnnnnnnnnnnnnnnnnnnnnnnnnnnnnnnnnnnnnnnnnnnnnnnnnnnnnnnnnnnnnnnnnnnnnnnnnnnnnnnnnnnnnnnnnnnnnnnnnnnnnnnnnnnnnnnnnnnnnnnnnnnnnnnnnnnnnnnnnnnnnnnnnnnnnnnnnnnnnnnnnnnnnnnnnnnnnnnnnnnnnnnnnnnnnnnnnnnnnnnnnnnnnnnnnnnnnnnnnnnnnnnnnnnnnnnnnnnnnnnnnnnnnnnnnnnnnnnnnnnnnnnnnnnnnnnnnnnnnnnnnnnnnnnnnnnnnnnnnnnnnnnnnnnnnnnnnnnnnnnnnnnnnnnnnnnnnnnnnnnnnnnnnnnnnnnnnnnnnnnnnnnnnnnnnnnnnnnnnnnnnnnnnnnnnnnnnnnnnnnnnnnnnnnnnnnnnnnnnnnnnnnnnnnnnnnnnnnnnnnnnnnnnnnnnnnnnnnnnnnnnnnnnnnnnnnnnnnnnnnnnnnnnnnnnnnnnnnnnnnnnnnnnnnnnnnnnnnnnnnnnnnnnnnnnnnnnnnnnnnnnnnnnnnnnnnnnnnnnnnnnnnnnnnnnnnnnnnnnnnnnnnnnnnnnnnnnnnnnnnnnnnnnnnnnnnnnnnnnnnnnnnnnnnnnnncacacgatgctgttcggttggccgtttgccactgggataagaaagtcttctaacacctggactcttttgccaaggaggcatgagcagcccaaaataacccatttggaaagcatgtgcatttgtcatgacctagaaaaggattgaagatcccaagtgggctacctgtttctgtggcactatccagggggcagtttctctcgtctctcttaaatttaccagggagaagttgattattatatcattctaattttattctaattagggtgacttaatattctcaaggaaggcttaagctgtgacagttagaggatgtcaccgagacactggagaggggagtgaagataggaacagaacttgcctgttccctcactcaggacaatgacttgtctactccccagtctgttgttccttgtctgctggtgaaggacaaagacatctgcccttctgttagctatgttccctgcagtggagagaccacagagccgccagcatggactctgtgctgaggtggccataaacccagggagtggtgcagtgggtgggaatcagaaacagcacttgattaatgggggcaatgatactggttttgaagctagagggagactagttggaacaatcataaattaaatacatttacaaaactgtaaatgtttgtcttgatgatacattggggaacctgaacttgcctgtggggccattttaattttacctctggttggagttagttgcttcccttactgttggcagtgtttgattttcacacttactttatatagttataatcaccatgaaaatatccgtgccacttgatcccatcatacagtgattaacaaacccattggggtgaacacacttgtgctctgcactgtgtttctccctctatgaccctaagataaaatcttggcccatgtggtccatctaaagacataactttatttttttaatatctatttgtttttatttttacgtatatgggtttttgcttgcatgtatgtctatacatcatgtatatacctatacctaaggagaccaaaagagggtgtcaaatgccctggaactggagttacaaaaggttgtcaatctgccatgtgggtgctgagaatcagccaatgtcctttggaagagcagccagtgctcttaaccactgacccatctctccagtccctaaagatataaatttaaaatttcaagacaacatttcaaggaaccaagctaaaatgtcacatccttgcacagctccagggacttggcctgatgaggagctgtgggtgaataaagaaataatagacacagacatcctgggtccaagtggactgggctgtctgctagagaaactgcaccgcagaaactcagtgtgcttattgtatagagttgaacagggaggcagggttattgcatacaaataatcaaggagtctgtgttgattgtacacagctggatcgaggatgcagatttgtctaatcttaacagaagtggtctctgaaggagtgtagcgggaagtattaaaaaagaggaaaccaagttcccgagctacacccagctactctctgcccatggtctcactgcctctatgctagccccatgcaaggacctatttcggtcttcccagctccacttcacctgcctcagagctgaccataccttctcagccatctaccccctgtggtcgggggtcacaattccccttaacccagtaaatcaaaactctagaagcttataattaatcagtctgatttacatgtcaataaattctcaattcacaagatgcccaaacaataacttcagagacaattggtaataatacaagctatccacctcgattagagaagttattccaattactctatccctatatgataatctatccctatattataaatacctgtggctatttaaagccactcggaatctgaatggtcctgttcgtcctccatcttcctccttctccaccttcctttcttcccctgtcctcccccatccctgtctctgaaactcttagctccgcctccttttccctgtccaatcacaggcttcctgttgtattaatatttaaattaattggacagggaaaattctgctacaaaggagatcagtcctcagaccataaacatagtgaggcaaggaagctacagtggcccatttcctgcccacactatcaacacttgcactcacaccccaaaggtttttatattttgctgagccccaccctggcagggaaggctttaccattttcccatggacctgaggctgtggggtcctcagcacagttgttcctggatcaacagcacagggcttcctcagttccctgcaagaaaattcggaggtcagaggacaacttgtaacaactggtctttttcttccaccctacagggaactggaatcagttcaatagcctttaccaactgagccatcttgatggccctgaagtctgtttataataagcaaaataaaaatctcagtaagacatagcaatggctgcatctctatacagaatttctatggcagcctcaaatgcagactacagcccaggcttaagcaccagttacagctggaaacatcccagagtgtcatcaattacgaaaggagagaatgcctgagtcactggtgctgacctaaatcacctctgccttcagtccctcagcaggcagcttgacctttccagagtctggcgccagagaacccaacagctttgatgttaatgaatcagattctgggttttaacagcttgccagtgtttgaacatggccttttgtagaacgtttgcaggtagcttcgtcctctgctgactgaggttgtcatgtgcacttcacacctgctattttacatcccagtgctcacaaagttcccccagaccctgccccaccaatgttctgagatctttcagcatcgctctcaggagtagtatggctttctctaagaaccctgtgttcatttgcatgaggacttagtctccgtgatcagaaaaggaaagtgctatctgtctgaatatgttgatataaaaattaagggctagggacacaattcaatgtgcaaaatgcctgctaggtaagcatgaaggacctatgtttatatccccagcacccatgtaaaagctaggtgtggctgtatgcatctttaacgccagcagtgggggagtggagacaggcagatctctgggctcactggccagccagcctagctaaaatgacagactcctggttcaatgagaaacctgtcacagaaaaaaaaaaaaaagtggagagagaaattgacttctgccctctatgctcctatatatgagtgagtgtatgtatacagcatgcacacacacacagacagacacacacacaaaacaccactgaactatatcaagcttattataacagtatacaattggaagcaacctaaatatcctactgagtggaaatatttaattagttatgatttgtccaaacaatattatacaggcattagcagataagtagatttatatgccccaatgaaagtcaaagtatcacttgatacgttgtgaacaacagcataggtcacatgcatttaacccacgtagaagtatttcagagatgcagggcccgggagcagtcttgtaatcaaggtatcagcgggccgagcccagagggctgtggatctgagaccagcctgcgaaacttagtaagcttttctttcattaaagtcaagaagtatcatatattgggtttaggactgcagagatggctcgttaggtaaagtttttgtcatatggacataaggacctgaaatttgattcccagactcatgaaaaaaaaacaaagctgtacacacacacacacacacacacacacacacacacgagcgtgcacgcaagagagagagctgagagagagagagggagggagagatcatgtatgctattgtgaagtaatgaagaaaatgttctaaaactaatagctgaaaaaaagatgactcagcccattgggctagtgccctgataagcatttgttagtgtgtgaccctgtcagcagggcttaggcaacatggttcatggttcagctgggtttgcttgtgctcactcttgctacaagggcttggtcagtgcaggttgggccaagttacatcactcatacatctagtgttggctgtgcactgtctgccaagcctcttttgtgggtgatccacagatatctttgagcagatctgcaacaatattcagtgttttgaaacaaaattataattctaaagttatgggaggggtggatattgatagattgctttgtttgagtatttcaatagtattcccccaaaggcttagcctgtggtccctgctctgcctctttgctggctgtgtctgaacgccagcaatacactggctcagtggtgcaaggcaaggtctaggacgggagtctgtagttcacatttccctttgaggcatcagcaccgctgtacaccaggctggaagggaaaagctgggtctgggactagcaggattctgatccccttgggaacgagtgctgagtactggaggggcagaagaagagagatggccttgctcagaaattgtggctctttcaggagaaggccttccccgtggcaatctctaatgaagcagccgtctgagatgatcttaacttgttcatatttctttattgggagtggatgtgaaggcatatgctttattggggtaaaccagggattatataattttgggggtatgagaatatccaggaagggaaggtcattggctgaaggctaaggctattgagatgactcattagcacgaagaggcgctccaggtactgtgacatgtgactgactgctcatggtcatcttaattgagtgtcatgggcacaggctccagagcaggcggtgcatgtaccaagatggttggtctcaaggctgatgtgagaggctgacagaagccaggggagaaaggagttcttcagagttgggattcagcaatgcggagggatcaaaatggcctggtaaaatgccacaattctaccacagaacgtggaggctcccagaaggatggggtcttaggcttctttcttgtcacagaatttgttaatggcaattgaacttaatctggttgtggcttttgaggaccctggcaggtctggcacttgtgacatgtggctaatgcatgattaactctgtgcaggttgtggcccgggaactgctggcccagtacagcaagcagcataagaaaaacctgctcttgggtgtgatccagaactggacagcaactgccggggacaagctgagaaccaggtacataccgcctgacttagtcagggtttctattcctgcacaaacatcatgaccaagaagcaagttggggaggaaagggtttattcggcttacacttccatactgctgttcatcaccaaaggaagtcaggactggaactcaagcaggtcagggagcaggagctgatgcagaggccatggaggaatgttccttactggtttgcttccccttgcttgctctgcctgctctcttatagaaccaagactaccaacccagagatggtcccacccacaaggggcctttcccccttgatcattaattgagaaaatgccttacagttggatctcatggaggcatttcctcaactgaagctcctttctctgtgataactccagcctgtgtcaagttgacacaaaactagccagtacaccgcccaaaacagcattctctctccttaaggggtttactctgagcctggttctagagccttgacacaggtcaacttgtacttgtttgacaaatttagtatctatgtgtacaaaagcagtagggactacgtaaaattagtgctgtgtctgccatccaacttaagatctcaaatatttctgactctgccctttcaagtttcttttttattatttactctgtgagtttaaatcttaaaaccttataaagtaggttctttcttacttccattttacaggtagagaaattgggggacaaaaatcaaatatttttcttaaagttacatggtatatgagtggcaggggtgagatttgactacagcctgtccagtttgaggaatctatgcctagattttttctttaaatttatttttagtatattgtctttaacctctattggaagactcggtatctggagtattatgtacttttctgtttccacctgtttgtttttgttttgtttgtttgttttttactttgttttacctaagttagaaacgtagacaggaagctttattgcatacgtaaatgccacaatttgattgtattatttaaatcttcagctttgattgatatttgaattgtagtcaatattttgtgtaaattggtaaaacacttcgttcatgttttctgaggaacatggggaggggattccaatgtgaagcaaaatgtccattctccagtgccacagacatccacagagtgagcccgccatctctacaaccgaagcccactcctcgcagtagcctgacctatgctggactcacagtgttctctggtgttagacagaaaatgcaaggacattgatctcaagcctttgagcggatctcatggctgattattgacttgtaatctgttgtttgaaaaacactcccctagggtccgttacatacatgtggagctgttcttttatgcagtgtgcccatgtttaatgtcagtaacctaacctctggaaaggtttcatgctacaattgctaccagtagcacgctgatttcggcttctttggaccacactgtcatctacaatgttcacacttgagaaccatgcagtcaaatttaaaaattcattctcaaaaataaataaacaaccccttcccccaaaaaacaaaaacacctcatcatgttttaagtaagtttgtgactttatatcaggctcccaagtatcttaactctagctcaggagaatctgacaccctcttatggtctccttggaccctgaacacatacacatgcatacacaaatatgcacacatgtgcatgcactcagagactcacatgcatgcatacatctgtgcagcacagtcacgtacacatgtgcacatgtacatacataccaacacacactaataagtatagtaaaatttaagaaaaaatgatttttctgaaagatacaatttcctaaaactttccatttattattctagtgcacatttgttattgctacattataaattttatcaagtgaattttttctttattcttttaatctgatatgcctttgttaaatttcttacatttattttgtgtgtgtatatatctgtgtgagcatgtacatgtgtgccacagcacatgtgtagaggtcagaggaaaacttgcaggagtcggttcttgacttctgtcctatgagttctggggctagaacctggatcatcagtttttacccatggaaccatctagcttgttcttatgtgtatacttctctgctttagacttacagcatggttttattgttgaactgtttggggagaactttttatttggtggaagaagtcaatatgtgatttgaaaatgatctgagcttgggagaatatttaaaaccttgatttaacccaatggctttaggttggttaaagcttttcctccatcagtccccctccagctactgcccctttgtcctgcgctcacctcttgtggcaccccgttgctttattgctgtggttcagtctccccagagcttcatctggcctactgggtttcagacaaccactgttccctctgtctctcctcaaatgaacctcgctgtggtggttaattttctttgtcaacttgacacaatatagcatcatctcagaaggactctcaaccgcagactgtccagattaggtacacctgtgagagattgtcttcttaggctgactcatgtggaaagatccaccccaaatgtgcgcagcaccatttcagggtctggatcccagaccgaatgaacagcgagcagctgagtactggtgagcgagcagctgagtactggtgagcgtgcattcattgggtgattgccctctgctgttagcttccatgtcatgtgacaagctgcctgacactgattcctgaagctgtgactttctggaagggatgggctataacctgtggttgtaaacctttctcccttaagttgcttttgtccaggtgttttatggcagcaacaggaaatgaaatcaaggcacctcttttctgttttactatgcccataaatgttatttttttaattctactttgggagagctcatagtatttttaaaataatcacttttacttagaaattgattattgttctctataacccaaatatattgaattaattaaaaaaaactattagaaaatgcaatcttataatcttgactaaaaacatggagaagggaactagagatatggctcaggagttaagactatttgcttctcttgcaaaggacctggattcaattcctagtacccacatggtgggtattacctacctataactccatttttaaaatttattccagttttttatttattatttacatatatatatatcatttgtttgttattactatatacagtgtctctttttggccactgagggtaccaggcacacacatggtgaacatacatacgtgtaggcaaaacatcatacatagaaaataaataaatctaaaaccacacagaatatacaataaattatgtattaaacttctcataaccattgggataaagaaaaatgcacagatctgcagccagtctcttttcgtccttgctccttaacttcctgtttatccaaactgtgctttattttagagcttgagttgctttactctcttactttttgtgcctcactttgtcctcacacannnnnnnnnnnnnnnnnnnnnnnnnnnnnnnnnnnnnnnnnnnnnnnnnnnnnnnnnnnnnnnnnnnnnnnnnnnnnnnnnnnnnnnnnnnnnnnnnnnnnnnnnnnnnnnnnnnnnnnnnnnnnnnnnnnnnnnnnnnnnnnnnnnnnnnnnnnnnnnnnnngctgactggtttgactgtttttctaacagagctgagaggagagtgcagaccccaacagtatccctttcatcctctcaggaaccctgttcacagcctgctgcaaatcattcgctctttgtttcctttccagagagcagagctagatgtatttttgtcactggaacatggcaagctctcaacatatgcaaatttatatcccctgcaaaatttccaggatagatttgagatgtgccgaagcagtattccaactgtaaatatttggaaagcgctagcccacttattttttttgtctcagtttttcacctctgtggtggtttgaatgagaatggccccataggcttatatgtgtgaatgcttggtgcaactgtttaggaaggattaggaggcgtggctttgttgaaggaattgtcactgggggtgggctttggggtttcaaaagcccatgccattcctaattagctttctctgcctggtagttgtatctctgatgtaagctctcagctactgctccagcaccatgcctgcctgcctgctgccatgctccccaccatgatggtcctgggactctaaacccctgaaactgtaaacctcaaataaactttctctcccataagttgtcttggtcatggtgtctcttcatagcaatagaaaagaaactgaaacatcctctagaacagttcacctctctcccatagccaggatttactcattctgtatgttggtagttagtcacttaaatcccacactttgttttttctataaaggagagctattgccaccaacacatgtccagaactccctatgtgccagacatggctctgcacatcagtatgacgacatagtggcagctgaactttgtttccatgggactcatgctctatttgaatagggtgaattaagtcttaatgacaatgtccaaggaagtacccaggagtgtggggggagagcacacagtaagaagggctgagaactccccaattctctgaagtttctctaagcgggaagccattatggggtcacctaaggctattgttcatttggacggtagaggaaccaggcctggctcagaaaggcttcatgaggctgggctgggaggtacagctgtaggttggcagggatgagggcagactcacaggaaagaggaggatctgagcagaggttataccccgactgtcccaggaagctctgcctctcaccatcctgcaggtgaggctgccaacgttaccctcacacttatatcagtctagaggcatctggataccagggggagaagattctgcctcccagtgtggtgttatccatatctaactgtgaaaatgctcagatatacaaccaagtgggaaggattcgagggtgaacgctcatgtattcacctttcacagaaaatctaccatgagacatgccacttacttactgttcatgctgaaaatttctataacatgtacaccgtcatgtgtcacttgacaacagggatgagatttgagtacccaggctgttttgtagtgggaacatcatggagtatatgtcacaaaactggatggtatagatcagtgttcagcttggactcttggtgaaattacgggacatggtgccactgtgggtttatgtggccattgctgttggaacatggcacattgtttaacggtaaatattttaacaactatttattatatactaaaataatgataaattatagccttgtaaatgcataaaggtataatacagttgtttattatcattatatagcattaaacgttatacctatttacttatgctgtacttttacatgacctggcaggcagcacagtaaatctgttcacagcagcatctgtgcaaacacacaagtcctgtgacgtgttgtgagcttctttctctttagatagtgtttctcttcataaccttcgttgtcctgaaacccagtctgtaacccagactagcctcaaactgagagatctaccctcctctgcctcccaagtactgggattcaagttgtgtaccaccacaccctgctcttgtgttgtgggatcttataatggccagggtacccataggcaatggtaagttttcagctccattgtgagcttctgggattgttatacagtgtgggcatcattgcatcagctcatctccgtgtgcatcttaaagtacactgcagatgtgagtacactctgaaatagtggtgtttactcaagttcaacctgtggggacaattccttttcctcttatgtagaattttttttatgatcccctgcacagaacttaaatgtacacttgttgagttttggcaagtgcatacatgttattctgatatttttccaccaaagcctagagtttcccattctagggttttatgtaaatggaacatactgtctatactcttttgtagctgcctcaataattcaatataatgctttttgagatttattcgtggtgtcataagtattactttctcccctttttattactgagtagtattttatggatattctgtgatttgttctccattctcttataacggacagacacctgggatgtttctagctttttgctccagtgagtagggcagctatgaatagtcttatataggcttttttatgaacgttgctcttgatttctcttgggcatataggagacatggaattgctagtcataacgtatgtgcttgttttatgagagactgtgggagtgccagagccggtttgaccatttgacactttcctgggtagatatgagcggtctggcttctctaccacgtccttggcaacatttgacacagtacatttaattttagacagacagctgggtgtagcatgccattgcactccagttttcatttgcgtttctctgatgaccggggatctgcatttaccttgaatctagttttccttctttagtcattgtggcttccttgtaaaacagacagttattcgaggtcccccctggcagtggtccaagtttcaaggctttctacttttgggtgacttccttgtgctcacaggggacacggatgtgtgggtgaggccctgcacacacagtgcacagcctaacgggaatatacactgaagtgtggcaacatcccaagatagaacagcagtttccaacacaaacattcacagttccaggcttcatggactagccactggatgactaagtcatatataataaaaataaataaaccacgcaggttccttacccctgtcatgaactagaccgagtgaggaactcagctttctgaagctaggttcagaatgagcattgatatatagtgatgggcgatttcccaggaactggtgtgtaaagcttccccacccccaccccaccaccacctttgtctttgaggaaggtaacagctcattgagcactttgcccttccagctcatgaagagtgaagtgcccttctgcttagaatgagcatcagctaactgggcttttaaggttaaattagtgggaacctgagttattggggtcttgcaatccttcactttcccaagatgtaggaaaacgggaaagtgagctatggggaaaccatttatgaattagaatcctatggactggttagcttctagtcaacttgacatagcctaggatcatctaggaagagtgaaactcaattgagaaaaggcctccatcagattggcctgtatgcgggtgattttcttgattgatgactggtgtgggagggcccatcccactgcggggtggtgctaccctaggcatgtggtcttaggttatatgaagaagcaggctgagcaaactgcatagaataagccagtaagcaatgtttctccaaggcctctgcttcagttcctgccaccaggtttctaccttgagttcctgccctgccttcccacagtgatggattagaatcaggaaatataggttaagtaaattccttccttccttcccaggttgttttgatcactgattatcacaccaacagagaggcaaactaataaaacacactttttaaaaaattacatttaattatttacgtgtgtgtgtgtgtgtgtgtgtgtgtgtgtgtgtgtgtgtgtgtacatgtcacagcatgtgtgtggaggtcagaggacacttacaggtgtctgttcacgctttgccacatgtggatcccaggaactgaagcagagctgtctcctgagtactcctgtatcctgtgatctaggttatcgggagagccgtgggaaagaaacacaaaatcagcaccaagtcagacttgtgtgagaaaaaaacccagggtaggggccactttttttttgtgcctgttgacaccccatgcttcagtttccccctttggcaaatgggaaaggtatcaatggctacctcctgaggggaggcataatctgtttctcctgcgcctgcccacagcctgctgggcacttagtccctccagtatcggatcccccaggataaaactcaccaaggcctgaaggtcttctctccgcgtgacatccatccttcttagaaggtgactgcgtccctctgagcttcggtttcctaaacagtatattaattatgatgttagataataattcaatatagacagttctcaataactcaatagtagataataactcgaaaatcttgaatgttgttataagcgtcacctgatggaaatggcataactgtcaataaagaagagctacatagaaaatatttgactcttaagatgccatagttggtagaaaaagcagggagtcatattccttctataacacaaggacaaatatgtagaataagccagagccaagcactcactaggaagtactgaaaagaagcccatgtaatgctagtgagagctcggatgggtgccatatccatgatgccttcctataggaagaaagtgatttggggttttaaaaatacacattctgctgtaataataattactattattactatcttcatcatcatcatcatcagtatcatcatcatcaccatcatcannnnnnnnnnnnnnnnnnnntcacaatgatctgcctctgcctcccagaatgctggggattaaaggcatgtgccacccaccccaacacctccaccttagctgtgcttcttttttttttaaaggcaaactaataactatgttcactgtgttttgtttcttctcctccagtttcctggcgtttaacactgacacggtaggatgtcttgcctttctgctgaaagcagtgaattttcgagaaagggttcttcagcggagtttggtgtccagaatttactataaggtaatgatactgcttttttttccttttgatgaatgtgtaaggcatagctgagccctgtgtttaatttagtaggggatgaatccgcccaatccgaagctgggggaagcactcagggctccacaggccgccttacagggcaacttcgcctgctcctgcagcatgatagtactgtttaaccctctgtgtgctgttctagaatcctgcctgtaagcatcatttggtgccatggtaggtgcagagtgaggtgattttcattgggaatgaaaaaaaattgtcctttggagaaaatctgtacattgaacatatgtaaagttagcattgtgctagcctgaggtgtgttgcactttttattaagaaatccatggatttctgtggaaacataatacagcaggtggagagacagctccattcctaaggagctttctgtgcaagcatgaggactgaagtcactccatccccaacacacatacacacacacacacacacacaccacagagagagagagagacagagagagagagacagagacagagagacagacagagggagggagagcgcagtgagtatggtagcacctgcctgtaagctcagtactaaagaggtggagacaagagtctcctggtgtttgccagccaacctgtgtaaccagccagtgagctccatgcttagtgagagtccctgtctcaaaagtaagagaatgggaatgagaagggatggggaaaacaccacatgttgatctctggcctctacaagcatgtgtacacatgtgcatgggcagccactcgcccacacatacctacatacaaatacccacacacaaatacacacaagaaaatgccatcattgatagataccaagaaggaatagctgtcatgctcagtgccagtgggttggcttcaggcagcactccagctcaacagggttcattatttggtccaaggcaagtggtcaacaagaccccagagggctttactcatccagtctctgagtcagcgctcaggacacagagagatctgctcctctgtgcaggtgctaaagggacaagaactgagtcctggaactctcttccaatccacgctctttatatcaatggcacagtgatgccactcagtctaacaggagataggaatgaagagaatgcagtgcatctggagatatgcattctcccaggaactggctgaatgcacaagagtcctggagatcataagcagttgagactcatccttatggagtagtgccatactgcctaaggacttgttggaagctgggcctggggatgagcaaatcagtccatctttcaggtagagatgtgaggcaaggctctgccaggccacagcggcacgatccggtgagtttaagtcactcctcacactctgggctttttgtccaagctctctgtacagctgcagagagggaggctatcactcagggcgaagatgagttgcacccagggcgcaactgagaatggagaaaatatagcctgtgaaccacgttttcaacactatagaagaaagagctgaagatgaaattgcaagagagggaaatagacaaaggtggaaaatgctaacaatccaaccagtgggaaatcccaaaatgccagaacaaagggaaccgcagtggcagtcacagacacaatggaaaaatatttattttgtatttaccaatgtgtctgtgtgtgggaagcctgtgcctctatactagttgcttttttcactgctctgacaagatttctgaccagaatagctcatggaaggttgcttgcctcacagtgtgagagtactgtccatcacagcagtgcaggcatcctgtccatcacagcagtgcaggcatcctgtccatcacagcagtgcaggagtgctgtccatcacagcagtgcaggcatcctgtctatcacagcagtgcaggcatcctgtccatcacagcagtgcaggcatcctgtccatcacagcagtgcaggcatcctgtccatcacagcagtgcaggagtgctgtccatcacagcagtgcaggcatcccgtacatcacagcagtgcaggcatcctgtccatcacagcagtgcaggcatcctgtccaccacagcagtgcaagcatcctgtccatcacagcagtacaggcatcctgtccaccacagcagtgcaggagtgctgtccatcataacagtgcaggagtgctgtccattacagcagtgcaggcatcctgtctatcacagcaatgcaggcatcctgtacatcacagcagtgcaggcatcctgtcctccacagcagtgcaggcatcctgtccatcacagcactgcaggcatcctgtccatcacagccgtgcaggcatcctgtcctccacagcagtgcaggcatcctgtccatcacagccgtgcaggcatcctgtccatcacagccgtgcaggcatcctgtctatcacagcaatgcaggcatggctgcagaatctctaggcagccagtcatgttacatctgcaccaagtgctccgttcacattcttctcttgtatttagctggggacccagcccatgggatcctactgcttgcattcagggtagatctttccttctcagttagacctttctagaaatatcctcaaagacacacatgataccctcacaatgcaggtatgtctagaaataccttacacatgcaggtgtgttttcatagtaattcttgtgctctcagttctattctccacatagtatggatgctctgaaacttcctaaacattcagaaacattttttctatttacagttgtcctctgccagaggaagagtaagtgttttcattagtgtctactctgattttgaaagaagaaaactttcacacatgcgagtgtgttttccaaacatcaaataaacattcggcaaaggatgtgccgaaaaattggaaaggactttagaacccgacggttaagatttgctgctgccaaacttcagcatcctcttctgtaatttggaataataaggctgagtacaatgcaaatgtgctacatggccagcatatcattgaatatgtaaagtagccgtggaagctctaactgctgcattcatgttaattagatcagtctctaccatccatgtaacctgtttacagacaataccattaaatattcatagcacacagacagtttctagggctaatcagaaagaagaccatcaagattatcaaacaggctcctaccctggggaaagtccacatccagttttagcctgaagcgaaattaagaaaaaacctacaaggttagtagaaagaatatggacatctattattttagtttgtattctagtttgtattcacctcggggttttcactcagctggatacaggtgagcttgtgtttgcttccatacgttaactgcatgtcgtaataaaatgattcttnnnnnnnnnnnnnnnnnnnnnnnnnnnnnnnnnnnnnnnnnnnnnnnnnnnnnnnnnnnnnnnnnnnnnnnnnnnnnnnnnnnnnnnnnnnnnnnnnnnnnnnnnnnnnnnnnnnnnnnnnnnnnnnnnnnnnnnnnnnnnnnnnnnnnnnnnnnnnnnnnnnngaggaggaggagggggagggagaagaggaggaggaagaggaagaagaggaggaggaggaggaggaagaagaggaggaagaggaagaagaggaggaggaggaagagggggaggaagagggggaagaagaagaggaggaggaggaaaaggaggaagaggaggaggaggagaaggaggagaaggaggagggaagccaaggtggcttcaggaacatgtgtgtcttcccagttctttggtaaagctttgaggaatttttttttcaaaagcacattccactgtagacatgttgaccaatcttctcagagcattggacaactactgttccttcaaccctgcagtgaccagtgagtcccacaacagagccagccccttgtggtcatttgtgtttctctcccctcagagaagcctctgctttgctggtgactgtagggagcactcaccctggcctcccatgggggctcatttctctggtttttcagacttgtgttgtaagggctgttcatagttgctgcctcatttccccacttgtggggaaaaatatataccaatgaggaatggtttggcatattgggaatattgcaccaggaaaagctgccgatatgcagggggtctttagacaagaaggcagattatcagtaattagtgtgtttgaaaaatgacttgactttcaaatgtacatgtcagaagctgggtaggtagagagatgagaccctaggtaagtgaactagtcctagttagtctagagttactccatggtctgcctctcatcccctcacattagctatacctctacttgaatttttgaggtttctttaatttttgagatttccacacataagtgtaatgtatttccattatcccccctctaactcctgcctcccccattccgtttattcttataacttctgttgctacacaggtgtaacaatacattcagtgttgctgtatgtacatgtgtttaggactgggatcagataacccgccagataagtcctggaaaaaaatggactctctctctctctctctctctctctctctagctattgaatgcctggagctcttcatccaggagtgggtatctcccccattcctgttgttgttatgcaggtcgtgtttaggccgacatattgttgagatttcatgggtgcagcatccctgtcaagtctagaatataccgtccttcagtagtcccagttgtagaagttgtgttatatgtgtaccaagtggggctgagcataccctggtcatgtatccttgcattctgaccagttgtggacctctgtagtagcctccatttgtttcaaaacgaagctcctttgatgaagggtgttgtcttagttaccttttctattgccgtgataaaacaccatgaccaagactgcttacaaaataaatgtttagtttggggcttataattggaagggttcgtgtccataagcaccatggtagagaacatggtggcaggcaggcatggtactggaggagtagccgagagcctacatctttatctgaaagtaggaggctgagtgaggcagagaaataactgggaatggagtgggccttttgaaacctcaaaacccactttcaatgtcacacctcctccaataaggtcacacctcccaatcctttccaaatagtaccaccatctggggaccaagcattcaaacatatgagcctatggaggccattcttattccaaccaccaccaggggaaagagcaacatttatctgtgggtgtaaggataagtatttagaatatagtttaaagctttattgggttaggcaatactaggatctgtgactcctccagacacaggtagttggttacgtttacagtatgtgcctgtactggctgattttgtgtgtcaacttgacacaagctagagtcatcagggtggaaggagcctcagttgaagaaatgcctccatgagaaccagctgtaggtcatcttctcaattagtgatcagtgacagagggctccaccatggtgggtggtgccacccctgggctggtagtcctgggttctataaaaagcaagctgagaaagccatggggaagaagccagtaagcagcactcctttatggcctctgcatcagctcctgcctctaggtaccagccctgcttgaattcctatccagacttcctccaatgagggacgataatctggacaagtaagccaaatgtaccctttccgcttcaacttgctttctggtatggtgttttgtggcagcaatagaaaccctaagacagtgcctctactttagagggtacaggaaaccactgggaaagagtgatttaagaaagctcatgcaggttgacctctgccacacctcaaggccaagttgaaaggaaagagagtatttttgcatcgatattcataagagaaattggcctgaagttctctatctttgttggatctttctgtggtttaggtatcagagtaattgtggcttcataaaatgagttgggtagagtaccttctacttctattttgtgaaatagtttgtgcagaactggaattagatcttctttgaaggtctgatagaactctgcactaaacccgtctggtcctgggctttttttggctgggagactattaataactgcttctatttctttagggaatatgggactgtttagatcgttaacttgatcctgattcaaccttggtacctggtatctgtccagaaatttgtccatttcgtccaggttttccagttttgttgagtatggccttttgtagaaggatctgatggtgttttggatttcttcaggatctgttgttatgtctcccttttcatttctgattttgttaattaggattttgtccctgtgccctctagtgagtctagctaagggtttatctatcttgttgattttctcaaagaaccaactcctcatttggttaattcttgtaaaaatactcaataaaattcttgctaaacgaatccaagaacacattaaagcaatcatccatcctgaccaagtaggttttattccagggatgcagggatggtttaatatacgaaaatccatcaatgtaatccattatataaacaaactcaaagacaaaaaccacatgatcatctcgttagatgcagaaaaagcatttgacaagatccaacaccgattcatgataaaagtcttggaaagatcaggaattcaaggcccatacctaaacatgataaaagcaatctacagcaaaccagtagccaacatcaaagtaaatggagagaagctggaagcaatcccactaaaatcagggactagacaaggctgcccactttctccctacctcttcaacatagtacttgaagtattagccagagcaattcgacaacaaaaggagatcaaggggatacaaattggaaaagaggaagtcaaaatatcactttttgcagatgatatgatagtatatataagtgaccctaaaaattctaccagagaactcctaaacctgataaacagcttcggtgaagtagctggatataaaattaactcaaacaagtcaatggcctttctctacacaaagaataaacaggctgagaaagaaattagggaaacaacacccttctcaatagtcacaaataatataaaatatcttggcgtgactctaactaaggaagtgaaagatctgtatgataaaaacttcaagtctctgaagaaagaaattaaagaagatctcagaagatggaaagatctcccatgctcatggattggcaggatcaacattgtaaaaatggctatcttgccaaaagcaatctacagattcaatgcaatccccatcaaaattccaactcaattcttcannnnnnnnnnnnnnnnnnnnnnnnnnnnnnnnnnnnnnnnnnnnnnnnnnnnnnnnnnnnnnnnnnnnnnnnnnnnnnnnnnnnnnnnnnnnnnnnnnnnnnnnnnnnnnnnnnnnnnnnnnnnnnnnnnnnnnnnnnnnnnnnnnnncatggtactggtatactgacagacaagtagaccaatggaatagaattgaagacccagaaatgaacccacacacctatggtcacttgatcttcgacaagggagctaaaaccatccagtggaagaaagacagcattttcaacaaatggtgctggcacaactggttgttatcatgtagaagaatgcaaatcgatccatacctatctccttgtactaaggtcaaatctaagtggatcaaggaacttcacattaaaccagagacactgaaacttatagaggagaaagtggggaaagccttgaagatatgggcacaggggaaaaattcctgaatagaacagcaatggcttgtgctgtaagatcgagaattgacaaatgggacctcatgaaactccaaagcttctgcaaggcaaaagacaccatcaataagacaaaaagacctccaacagattgggaaaggatctttacctatcctaaatcagataggggactaatatccaacatatataaagaactcaagaaggtggacttcagaaaatcaaataaccccattaaaaaatggggctcagaactgaacaaagaattctcacctgaggaatactgaatggcagagaagcacctgaaaaaatgttcaacatccttaatcatcagggaaatgcaaatcaaaacaaccctgagattccacctcacaccagtcagaatggctaagatcaaaaattcaggtgacagcagatgctggcgaggatgtggagaaagaggaacacttctccattattggtggcattgcaggcttgtacaaccactctggaaatcagtctggcggttcctcagaaaattggacatagtactaccggaggatccagcaatacctctcctgggcatatatccagaagatgtcccaaccggtaagaaggacacatgctccactatgttcatagcagccttatttataatagccagaagctggaaagaacccagatgcccctcaacagaggaatggatacagaaaatgtggtacatttacacaatggagtactactcagctattaaaaagaatgaatttatgaaattcctaagcaaatggatggacctggagggcatcatcctgagtgaggtaacacattcacaaaggaactcacacaatatgtactcactgataagtggatattagcccaaaacctaggatacccaagatataagatacaatttgctaaacacatgaaactcaagaagaatgaagactgaagtgtggacactatgcccctctttagaattgggaacaaaacacccatggaaggagttacagagacaaagtttggagctgagacgaaaggatggaccatgtagagactgccatatccagggatccaccccataatcagcttccaaacgctgacaccattgcatacactagcaagattttattgaaaggacccagatgtagctgtctcttgtgagactaggccggggcctagcaaacacagaagtggatgctcacagtcagctattggatggattacggggctcccaatggaggagctagagaaagtatccaaggagctaaagggatctgcaaccctataggtggaacaacaatatgaactaaccagtaccccggagctcttgtctctagctgcatatgtatcaaaagatggcctagtcggccatcactggaaagagaggcccattggacacgcaaactgtatatgccccagtacaggggaaagccagggtcaaaaaaatggaaatgggtgggtagggaagtgggggagagggtatgggggactttagggatagcattggaaatgtaattgaggaaaatatgtaataaaaatattttttaaaaaattaaaaaaataaagatatacctaaaaaaaaaaaaaaaaagaaagaaagaaaggaaagagaagagaagtatgcaaacaaacgagcatcgagcgatcgtcaaatccaagtcagtaaactgctcattttctttatttggagatgtagatggagaatcagggaagtctggaaataaggttgctagaagcataactatgtagcactttctatttagacaactactgttactcaggtttttattgttgttgatgtacaaccacagcattctgactgtctgagataccacagagcttctgcaaacaatggcagctgttctgtttgttacaagtttaggcctgacaatagatttgttcaggtccaagagttgaggttggggatctcatctcagctctcatctgtagaaaaggagaagtgtccgtagtgactggatggcccatgagtggcacatgcctgggcaaagggcactcagaacatccctcaatcaaggatcttcaagaacactggtgaggtggtggctgatggagctaggaaaacattgctgtcagtcagctcagacagagactccagtgctggctgtatccgtttgaggctacagacaggacagagtggtagccggcagtctgcttgttaaacgtaaaagatttatttttattattttcagttatgcatacttgtgtgggtgggggattaagtacaagggagcacaggtagctgtggaggccaaagtcaacaaatcccctagagctggagttgctggtgactgtgatccacccagtgtgggtgctgggaaccactgaagggtcctcttccactacaagagcagcatattctggtaactactgagccatctttccagcccatacttgttaagttttagaacaaacaggctagagagacagctcaatggctaaaagtgcatcacatattgtcctttcagggtgagttccatccccagcatccatatcagatggctcacaagagcctgcaactcaagctccagggaacttactgtcctattctggcctccacagacactgcgctcacatgcttataccccacacacataataaaaagtaaaaataaaatctcttagatacaaaaaacctagtatggtgacctgaatgagcaggtacttgcctaaaagtctcttggcacagaaacatcaagagctttgctccaggcacagatcattagagacagaagatgccatgagaggtcacatgtcccaggttcatagtttatgttgaactcaagggctgctttatacaaaacttcaacttcctctcagttgtctagtgcttaaaaattctgggatgtgaaacaggttctgttgctcagggtttaaatactgaaaggcctgagacagggaagaggtgacatggcccaggaagggatggcacgcccaggaaggggtgacatgctcaggaagggatgacatggcccaggaagggctgtcacgcccaggaaggggtaggcagtggtttgcagagttctaggaacagaaattcaggaagccccacggtgggctgtgctcacctctcagccttcagtgctctcaagcatttgcttagctcttccctctttgtcatggccatcgttgctattttaaagcccacttaataaattttgacatatgcacacacacacacatatgcatacatacatgcatacatgcacatattcatattcattcatccccttgtttctgttcctctagagaactctgactaagacttatgtcatgaaactatcctgttacttggtcttttttctctcttgctcccttctccacccacaggagctcagaaacttattaatatcaggactcacgttttctccctcgcttccaaccctctctgtgcatgtcctttactagaaagacattagcaagtgactgttcactccagacaggacaccatgatagaccaaagaaatgactccatccaaagtctagcctactaactcagtgcgatttggggtgaggggtacatacaaggcaataggtgaggagtcactcaaaggcgtgggtgacataggcaggtgcgtcactgaaaagcctacctcagaaggggtcatgactttggagttccctgcacactttcactggaaatcttcctcttatttagcaattgttccagcatatataacctgtggagagaccttgtgaactgtaagttttaggagcttcctgcaccttgttgtgtttgctcctgtgcctctgagcctcgctccaggaagcagtgtttccatttggaggaaatagtcacataatattccctctttcccatacccagagccctaaactctctttctgagaagagactgagaaggttaagaggaattcgaaataaagaagaggaaagaaaattttactcctgttaattacatgggaatggtggccatttccacgggagtctgtgagcttggaaggagtctttgagatcatataatcaggcacattcattactggctgcctgcctggatcaagacagcccatgctttcttcatggtgttggtcaccaagggtacaaggggaccgaggacagtccagagatgctcctccttgcatccagaagtgctgtgctgacttcttggctgggaaggagcttctctttccctcatcttgtcatacgtgtattacttggaaacaaaagtatctccccaaattattcattcagtgaaatcctattacatcaggatgaattcgtcaataattattttacactttggtctataatccaatactgttgattacttcttgattttgatccaaaaagaaaaaaatactcatagctttagccatgatgagctgtttgtttagcttggtctccatgtccctttcatagacaccctgacacctcttccattcattctttctttttcttttctttctttttgagcatttacttacttcatggtttttctttgttactggcaactctagatcaggagcccaggctgctctggagagaattgtatttaaaatccagtgtcttctccttgggttccctctgcttcctttccaaagccatagattacgtataaatatgaacatatattaagtcatatgtattagaaaccgttagaaaccatgagtttttaatgatggctccaactccagtatgaacaatagggttcattttaaagtctttctttcatttgttgctccttgtttgtgtctgtgttcccaaggtatatgtcaagaacttaacagaactcttcctggtgaggaacacatttactaactggaatccagtatttttctctgtaacattagccctacatcatcaaatcaaaacagcatttccaacatttctctaactaggtcattcccacttttctgcatggctctctatccaggagtagcaaaccaacttgttccgatgtgtaatcttctttcaactccccctataccgtggctgatttcacttttccgtttacttttaaaattattatttttagggtctctatgggaacctgtgaagttccctagcctcattgctgtacagaaagctacatctctttggcttctttttgttttgctttactgttgtggtttgaaaataaaatacccctacacattctgaagtgttgaagacctgactcctagctagcagctcctgagaggggactgagcacacaaacctagtcaatagagcaatccattgatggacccatcattattgatcaatgatggaaactaggaagtaggtcttatttggaggaactgggtcactggggctgtattcttgaagagtctcccttctccatccccctccctcttcctctccnnnnnnnnnnnnnnnnnnnnnnnnnnnnnnnnnnnnnnnnnnnnnnnnnnnnnnnnnnnnnnnnnnnnnnnnnnnnnnnnnnnnnnnnnnnnnnnnnnnnnnnnnnnnnnnnnnnnnnnnnnnnnnnnnnnnnnnnnnnnnnnnnnnnnnnnnnnnnnnnnnnnnnnnnnnnnnnnnnnnnnnnnnnnnnnnnnnnnnnnnnnnnnnnnnnnnnnnnnnnnnnnnnnnnnnnnnnnnnnnnnnnnnnnnnnnnnnnnnnnnnnnnnnnntccccctctccctctcctttccactcatcatggagtgagcatgctccatgatgttctgtttcactatgacccagaagcaacagacccttgtttgttccaggtattgtctcctgatgagggaaaacttagacattcacctttcccatcctccatttcctccatttctccatttccatctctccctttctccccttgctaagctggcacttgtattttttttcccacaatgaatgttcatgtgtgcatgctcctactgcctttttcttatatgaagggtagactatatagacttagattttaccccttgtgctgaagagccatctgcgttgtggttacagctcagctcactaggcctctcttacacatttgatttcccatttatgatttcataatttctgaaactctgctcagagggagagggtgacgtcggccgtgtctacttcctcctaatctcatccacagaacagagtctgctcttgtgcttttcctttgttgggtttgatgggtaacatgttatctccatgttacatgtgtgtgcatgagcagcttttgctgtgtgagggtcacggcaacctttcttgtgttttctgctcctaccaggtctgtccttctccatgagcttttgatattttgcatcaatatttttttctgcactaaggactgaatgaaaggagccaggaatgatggctcacacctttaatctcagcacatgggaggcagaggcaggtggatctctgaatctgagaccagcctggtatacagatcagttccaggacagctgggctactacatagtaagaccctcttaaaacaaagcaagcaaacaaatgctaatgaaaaaatcaaaaagtgtttattaaattaatttggtttttaagaaaacattcctatgaaagaaaagctgcaggtttgtgtcattttattgttgaatctgtcattcattttaaacaaaacagtgccatttctgctggccagagttttgtcactgtggcacaaatacacacagtgtaacaaggagaaggttgatcttggcccacagtttctgaggactcagaccatgctgactggcattctcttccaagcctggggtgagtcagaactctgtgataaagggtgtggtgctcaccctcagcagccaggaagcagaaggaagagaaaggagaggccacagacagcacaccactcgaagcacactccagtggcttgcttctctcaaaggcaccaactctaaaagttaccacctcccaaaaactataccccaagcccaggatcatgccttccacaggagcttgtgagggactgttcccatcccaaccatagtaccagcctgcttttaaaaacagcaaaagactgactggatcagtgtatgtgcagagcaaagaaaaacaagagctgagcattcttcataaatgaacatcagcaacatagtgactgacgccaataatatattttaaaaacaaatcacattataacagatgtatttattccagaattgtaagataggtttgatgttaaatattaaccaataatataaacaatggaagttataatacaaaaacaaaaaacaaaaccttccaaaggagatgatgtgtatgataatatttttgttgtttctgagacaggtggctcactctgtagaccagagtgacctagaactcacagagatttccaggcctctgctcaatgagtgctggggttaaaggtgagcaccaccatgcccagccatgaaaaaatttaacaaaactcctgaccaaaaagagagaaaatcttagtaggaatagaaaagaattttcttcactttgagaaggactcatctatatgtatttcagagtcctgtcagtataactggcaggaggaggcagagaatcagggacagagaaagataaagggaaaaagagagaaggggagggagagagaaaggaagaagatgtaaagattgtaacaagaaataaagctgccttgactctcgggtggaatagacctttttattttttggtagaagatttaaatcaatgctagtaatgtggttgagtgggtaaaagagttttacccacaaacccagagacctgagttcagtttccagaactctgtaaaggtagatgggggaaccaattccacaaagctgttcttggaccacatatcctgcatcaggcacacgcacatgtgtgtgcatgcgcgtgcacacacacacacacacacacacacacgcgcgcgtcaatgaactaagaacatgaaaagaagacctaaaagaacttaccaaacagaattctacaagatccaaaaagcaggatatgattgtaagatgtaaaattcaatattcaacacaaagcttgtttgtacatcctctcagtaggcaacaggaaaataaaagtcagtttatagtatactcacaaacatgagcatcttatatatatatatatatatatatatatatatatatatatatatatatatatatatatattcagcagtgaaaattccaaagcataaaagaccagtgcacaaaacactacataatatgcacagagtaagtcaagagatattaacaatggcaggacacatatcttgttagtgtatgagacttaacgttgccatgagatgtcccacgcccccttcagagtcagctccacttcagtcaaaatcttggaaagagtgtttgtaaacttacaaactcacttgacagtttatatggaaatgcaaatgatgtaaaatagcccacagaactttgaaaaaagtggaagtcactgagggctggtgccaactgatttcaaagcgtgtgccgagactgtcctagtccaggcctgaggacgttggcaggaagttaggcagaccggcagagcactgccaggcccacttagcccacatatttgcccactcaaattctcacatgaaataaattaaacaatgaggaggattttttctttaaatagtgagaaaaagtagattctgaatgaaaaagaagcaagctgtggtctgtttcttactccgtgcacaaatgtttattaaagaccaacatagacttgaatataatcaggggaactgtaaaatttccagagaaaacagaaaagcatcaccaatatctactggaagccatggtaaacaaagatttcttagggaaacacagaaagcaccaattgcttacattagctattgataaattgctgttgtctgaaagacacacatcagggcagaggcaaacactaaacctgggggaggggaggaattacttgcagtgtctgtctgtgtctggcaaaaggttttatcagaatgtgtgaagaacccccaggatgaaataatgaaaaagatatgatctaagaaaagttttcacaaaaaaacttgaaaagacacctcataaaagaagataaaagaggagctaatgagcacgtgaaacttcgcctaatcttattagtcatagagagctagaaatcaaaaccacaaagaagaaccaacacccacccactgacgcatatcaactgaactgctagatgccactcagccccaggggtaacgcagggcagcgctggctctcataactaagacattctaaatgcaatcatagaagctgaggatgcaacgtgatgttagagcattcattcactaccatgcacaaggccctgggttcaattacacacacacacacacacacacacacacacacacacatacacagtgagagagagggggggagagggagagggagagggagagagactcacacacagacacacacacactagtttggaagtctattgtaatgttaaatgtacacttattctatgatccagaaattctgtccctagagatatggccaagaaatgatgctacatggttcataaatagccttatacaggagtgttcctaacagctctattaataaccccaagttggaaactggaaactgaatgtttatagatatgaaactagacaagtaaactgtggttggcttcacatagtgaatcatgtgacgcagcatgtgtgagttctactgacatgcttagtgatgtgaaagcgtgtataccagataccccatgtattcgacggtcgaggaggaggaaagccagctgacggtgatatagtgcagcagtcacaatcagagagggagagggtggtgctgcatgcggaagcacagaagttatctggggaactctgtctctcaattgagtgacatgattccagggggtatgtacacatatgaaagaaatcactgatgagtgttgtttgtgtgtgtgtgtgtgtgtgtgtgtgtgtgtgtgtgtgtgtgtgtgtgtgtattgagaaatgacttggttattaaagtcctcacgcagccatgaggacccgagttcaagtcccaggatctgatgtatcacacacccgtagtcttagtgctgaggaggcaggaatgatgctctatgggcctttctggccagtcagtctttccaaagcggggagctccaggttcagcaaaagagtctgtttcaaaaaacagactggagggcaactggggaagatcctgacgtggaactcctgcccccacgtgcattcacatggacgtatgcatgcgcgtgcacctcctccagacacttaaaatatcactgagctgcaaactcaaggttgatacaggtttcacatctaacagtgcatgtgctatatctcagtgacaggacttgaaggtttcactcaaacaagccatcccagtggctaggatgtgtaccggaaagtcattgcagttttctacataagttagaaacagtgaggtccaacaggtggccctatttgtcttgactaatggcatcgatgaggattcactagggtctatcctgtgctgggatctgtgttagacacttcaatgtcacatggaaaaatagtaatgggtccccaggctacccagcagcatagaatccacatagtcagactggtgacaggtcagactgcaagagatgcccagtggagggccagttctggcagcagacaggtaagcccaaagagcctagacattctgctggcttcttgatttgaggccagactttgggaaacaggactttggtgatctggtgaggatgggccagtcctcatagacctataaagttccatggagatctcccagatcagggttggcacggggacagataaactggctcatgcaagaataccctctccaaaggcagtagacagatccctgtggtcagttgaggtcacaaacctcagtgatgttcctaccactgtgagcttggactagatgaactaaaccaataaagtaatccttgcacatgtgctcattggttcaatgctggatcagtggggcaacaaccttccggcctgcagggatgtcagttaaaccacagtcgggcagggaaaattctgatgccaccagccagactgaagcagccggtgtcattgaggacaaagcatttaagaccaaacacagggtgacatgtggcatcggtacacagactaagttcagagaacagactcagactgtccatgcaagggcacacatctgacctgttcacttgaagacagcgataactccagattcactcctctgttctagatgctgagaggccccttgctggattagacttctttatggtagctcttgtggacccgcttggattcctgcggctttcctatgttagcgctggttcctgtgtgtgtgtgtgtgtgtgtgtgtgtgtatgttttgggggaggggtggttagtaggcaaactgcttgcctaacgtgcctgcagccctgtggtcaatccccagcaccatatgagaccagtatggcagcgcacatttttgatcccaatatgtaagaggtaaagataggtccttccttgactacttagggagcctgaggctaacctgagcaacatgaaaagaaaaagaaagtaagttccttagttcagtgaaagatacctaaacgcggagtcggaacttaggatgtatgtttaaaaggaaggaaggctggagaagaaagagctatgggtgtttttattttaattttaattatgttcttccttgaaaaatgttgtgtacagggctcatgtataccaggcactgtgagcatttagggctttaaggaggtcagagaaccaaaccagacagatttccatgccttgagcaagggagaccagtaaggcgtgacagggctggttggtggacccaccgccttaggcatcctgctcacagctccgaggatcttctacattccctgcatgagatgactgtgacacaggtgtcctgtgaagaccctcctccaccccatcagtgctacaagggtgacctgtataatggccacagtcacccatagctcagatgactgagcctcagctgagacagcagcagagaaaccaagtgtggttgatgtcgagcaaaggtacccagggctccagcttacatcctgttttcagggtagcgtcaccaaagaggaaagaccccccaagacgtcccaggtcacagtgggtcagtgattttgttccagatgcctcttctctgaattcatccccaacccccattttctgcacacccacactgtccttgcctcttgctcgttggctcattcctctacgcaccagccagacccttctccagcaaacggctgcaggttcagggaaaaattatctctaggcacaatttctttcccataataaatgtacattttttcctgctttccgtggacttgtagcagtcactaaaagcaatcgggtcttcagctggatggggagtgcaggctgttgaaacacaatctagctgactgaactccagatgcatgcattggtgcctgcacagtgtattcagagccctgtaattgtattctttcacttctttctctgacagagcagctaaggaggagctctgaaaatgaggatgctgttaagagagggaccaggcagcaaacatttatttacagatctgttactggaaattatcaagatccatttcaggagttgagctttcaaaaaaaaaagtgctctaaatgaccaaggagaatgtattgcccataatcattttctatccctgatggctaggtaatgaaaagcagactcttcattgaacatgaaagcaggggaaattaggaagtaatatattcaattgtagaagccctttgccaagactgtattgatttcatgttctgacaacttcagttaaatctccatggggaaacacttttgaagctgatcacatctaagacgtgcatgttcccactgcttggactccaggactccggggttggatagaagtggtgatgtctcaactgggaatgcgaaactccatcttctctttgggacatgttcattctgattgtgggagagcatgggctataaaagccctagcatgaccataactgcaatgattggagaggctggccccctctgctgaacccactctaactattcctctgcctcctccttgtatgtcttcctctgatctcagcacccatctacaatggccaatcctttcatgtagccattagccctggccagacactcagacttgtgctaggtgctggggtcatgtggccagccagagcagtactcacactctagcatcaagaacattccagcagggctgtgccagctgcgtgggagggtagaagagaacaccaaaacactgagaaaagatactggggagcttccaggaggaggtgaaattcttgaagccaggaggagggatcagggaaagaagacattctggtagagagaattttgtgctgaaatatctgggacaatgtagcatttagtttttgctaccccgctttaagctctgggtggacgacaccaccagtgccatcgaggttcccttggattcatggatgaaacacacacattaacttattttcatcctgctttattggctcaattgctggcctcttcaattctcctgtggctagcatgcccttcccgatactcttagttaagcacatcttaatgtgcccttagttgcatttccaatctcccacatagggaagtggcctatggccgctctgcccaagatctcacatgactagtcaccttttctcctcccgaagcatggtgaaatctcccttcctcttcctcttcctgcatctcttagcttgtctgtgggtacccagaaatccctcctctttctttctgcccaataattggcccttggcatctttattgatccatcaagaaccaattggggaacaggaacttagcatcaaaaccaccccctacagacaagggttggggatgggaagctcatttggttgaatgcttatctagcatttacaatgtgctgagccattccccagagctgcagagaccaagtgtgatgccacatgcttgtagtaatcccagaactctggaggtggaagaaactcaaggccatcttgtgttgcatagcaagcttgaggtggaccttagatatatgagaccctatttaaagaagagcgtgtcatagaactgttcacagatctctctgtgtgtctctgtgtgatctgtgtctgtgtgtgtgtgtgtgtgtgtgtgtgtgtgtgtgtgtgtgtgtatgtgcatctaagttcacctcttttgttactgtttcactctgtagtcaggctgacctggaacccattgtgtggccaaggctgtccttgaatttgcagcaatctttcttcctgctgcttcatctgaaattgcaggtgtgagactccatgtccaaatatgagtccgcatttattgagcacacactctcgcaggcattgttggcaagatggtgcctttgcttctgcgtgagtgaggatgtgggtcttagccacatctcagataaccaaggacaaggtacgcagtcatactccttaaaaccagatactcctgtggtccaggatgtgacttggagacagtttctggattcttctaatcctcctcggtaaaatcagaatattttcttacatatgataatcacattatgcctgtgcttggcacatgcaatgtgcttagtgtgttttacgagacaggcctttcctaccattgggacgtcaactctgtgtttctctgggaacgtgtgctgggagttccaactctgcacctcagaacaccacctccccccaaccccaggcaagtttaacacattttggagaaagaggattctggttcagtaggagctggtgcccagccagggacaggcatcagtctgcggggggtggtgcagggggcagggggggagcagggtggcagaacagagtgctctaagatgaaaacatgctctggtgtcttcatctccaaccaggaggctgcattctggaggcaggagcatctagcctggggcatctagtctgtgtaatagggctctcctatggtcagtgtgacagcttaatggataagggtacttgctgcctactgtgaagatctgagtctgagccctagaaacccacacagtgaaaggggatgaactgctccctccagaaatgactgccccttccctctcaaaaaaaaaaaaaacaaaaaacaaaaaacaaaaaacaaaaaccagtagggttctgcagagggacagaaccaagaaaccatatatgtgattaaaagagaggatttattgcattggcttacgttctctgagtgaagctttgctggctggagaactttgtaagctgagaatcattagctgtaagcccaagaagctagaggccagcagacagtgagcaagtgctgagcctcacagagacacagccaggaatagaccaggaggaactgatgagctaatctgcctggttgaagaacgtggtgggcacagagcacataggtgggctaggagaagacctggaccaggcacttgctgcagccctggtgggaaagccaccataggagccttaaaatgggttcccggggaggtaaaaaaggcagagagtaccccatgactttggagatactgagggaaagtccagggctgagattgtaaaagagggatgtttgggtcaggtgacgttggcaaagaggaaccatgcctatccactcacccagtgtactgttcccttgggccaggcaccgtgctggggttaaagtgcccacattccactggtcaggtcaggaagggacccaggtatccctgaaacacccagaagaaggagactatcagccacagtgctggcccgcagagctttgtctaaatgtgctttcattctctcagaacacgaaaacaggcgggcagccagggtcctgctgtggttctgtggccaaagcctggccaggctcttgctgtttttcctctctgcttccatgttgtgagttaaactgtccccaacagaagggtatgttcaaatcctagccttcgtgacccgtgaatgccaacttaattggaaaaagggcctgtgtagctataaccaagttatcagcgaggaagtcatcctggggtgcatggacttactccggtatgcctggtgcccttgtaagaaggggggagatacacagaggcagatgcagggaaggaagctgtgacagtggctaccaagatcagagccccacagtgacaagagaaggtagaccagagacggccaccacctgaggctaagcaaggcaggacggcatcttaggatggagtggtgcctgctgacaccttggtttcagacccaatatctagagtctcaggcccctgagactgtggtcatttcctatagcaacccccagaagccagaaagctctgtaggtgtagctttcctctgttctcactgctgtgtggtggctggcttgtaggtgtggaaagaacagaaaaaaaaaaaaaaaaaaaaaaaaaagcacgtgccagcctgggtggggtcttttcaggaaagtggtggcttccacagagtgccctgcagacagacaattgtctgttctcgccggcctcagaggctgcatgcgtaaccccagtgacagagaaattttgtagagaatcatcctctatatacaagtatgcatacacacatacagaatttatatattgtataattttaaacttattaatctagggtatttgattactgagcttgaacaaatgcatgtggtcaaatagctctcaccaaatctagacagaatacccccatcactccagaaggtcccctcaagccactttgtcatctgtcaatctctacttccaaatatggtttctgtacaactctgaacttttctttgctatagactcacagggccgtttctttcatctgtgttttgcataatttattgtaaactgaatagtaagccttttgcttctggcttctgttactttacacagtgcttctgggatcaggcagctgtggctgtgtgtctgtggatgttccttgtctctacagagtagaatttctgtataaggtctattctatctgtatgcccagtaaccaattgttacattgaaaccactttagcgattatgaatgaaacattttctaacaactctttcccaagacaactgtttcaatttatctgtgcaaacacttcagagtgcaatgaccagcttctctggtggctacatgctaaattttttttaaaggaactaccagactgtttccaaagtggccacagcaccttgcatccctaccagggatgtggtctcagcagctgaccattcttgctcaagctctgatcgccagtcttactcactgttgccatggtgggtgtgaaatggcttcccactgtggtctcgatttgcatttctcaaaccctctctgtgtgtttattttccatttcagatacagatgggcaaagtgtctgctcaaaggttttgcccatgtgtttaagtgggtttccctttcatgggtgtattttattataagtcattcctttccacttatctgtaatgctgatacacacacacatacatacatacacacacatatatgtatatatatatatacatatatgtgtgtgtgtgtgtatgcatatatatacatatacatacatacacatatatatatgtatatatatatacacatatacacacacacacacacacatatatatatatatatatatatatatatatatgtacatggtagctttttaaagtctgtcatatacatggttggcaaacatttccactactctgttaccttttatagcagtgtgctgcaagagtaaaggacttattaaaataaagttttccatatcgtagctcatgaactttttgtctaacccagtgtggctaagattttcctcctgtagttcctaaatttctataagtgtagctctaaaatttaggtcagcaaatcacttttgcccaaagtgtgcagtatgggctgaggtttgcttgggtttgtgtgtgttcatgcatttatcctggccatattccttcagaacatcacttccctgtcttcaattaccttaatgactgtagatgtgtggctgtatttctgggctccctgattgctccatccctccatatttcttttatttttaaagatctatttatttatttgtttgtttatttatttatttattatatttaagtacacatataagtagtagctgtttcagacacatcagaagagggcatcagatctcatcacagatggttgtgagccaccatgtggttgctgggatttgaactcaggacctctgaagagcagtcagtgctcttaactgctgagccatctctccagcccccatatttctatccttaacccaactatattccattgtgctaactgcagctttatctttaaatcagaccatgtgaatctttcaaggtttttctttctcaaaaccacctttgcctattcaaggttctctgttgtccctacagcttctgtcctcacacgttcttaccaaagctgaaagctggctggagttttgatgggcatgtgttgactttgcacatcaggatgacaaatgacattgtagcaatatcaaggtttcccatctgggaacatagcaatatctccgtccatttaggggcctttgtaaatttctctatgccaaggatattgcaaccctacagaaagaccaacaatgtcaactaacctggacccctgggacctcccagagacagagccaccaaccagagagcatacataggctggtccaaggctccaggcacgtatgtaccagaggactgccttgtctgacctcagtaggagagggtatgcctaatccagcagagactaaagtaccagggttggggataccttgggggggtgccccctcaggtaaaggggagaggggataaggagaggaactctgtgaggggagaccaggagggaaggcagcatttgaggtataagtaattaattaatttaaaattttctgtatgccatatttgggggggttcatgtttgtatttatacatattttataagtatttcatgtttctggagttaccataatatttttttaaatattttttatttatatgtgtgtgtaagtgtataccatactcatacatttcctgtggaagccaaaagagggcgttagatctcccagagctggagacacaggcagttgtgagcttcctagtatgggtattgatcgaaattcagatcccctgaaagagtagcaagtcctcttaaccactgaactgtctctccagccctataataggattttcatttcatatttctaattgttcattgctgggacataaacacggagttgactttttaagtattaatcttataccttgtgactttgcttaatttactaaaaggtctataatctttattatatatcccttggtattatcttatagacaattatatgttttttaatataaaggttttgcttactcctttctttttctttctttctctctctcttttctttcttcttccttcttctttctttctttctttctttctttctttctttctttctttctttctttctttctttctttctttcttcctttcttttcctgccttattgccctggctagctcctccagcactctgcaaaggagagaggtgaaggcagacagctttgtctccctttccagagggagaaaaagcatttattcttttactatcaaatatgatgctagctgaggatgtttttaattatggtcacctataaggaatgtttctagctggctacattgctcaaatccatttgaggtcagtttctagaaacaaagaggagtaggtctgatcatttaccacacagaaggctttttctctatgtcctccactctgtatcttgattgtgctgtgactgtgcttttcattggacacttgaagaacgcttctgtttgcaggcatgtggtcacctgtggtaatataaacagcacagtgggaaggatggccccacatagttccccaacctaggtccattgggagtcggtgcagtcccttggtaggaacatgagctttgaaccctcggtgccaagttccaactccactctgcaatgttaggcagattgttctgcttctccgggtcaccatcctctacccatgaaatagaagcagcagtgatccctgccctgaaggctcctggagagtaaataagtgagtaaacaaagttcaatgctttggaagccgtgcccggtgcccggtgagctttaaggactcggtttgaatgtgcctagtttgaacacacatgttttcaggagctgtttgtcacctaagataaaggacaactgtcgtttaaaaagtctttctgcttgtaacctctcacgaggtattttaggtgggagggttcatttcctttgttttataacattgcttatgcagtaaataactctacaaaacccctgcataggagatggggtgttaggactgtgggaaatgacattctcccatctgaggctgacgtattaggggaaaggtctatgggaccctctgggagccttgggaacccgctgctctcttgagttgcctttctctctttcttgtggtctttgaagaggcaaagaagccgccagagtcttttccagcctgttctctgtccctgttttctgttgatcaggccactgaaaagcttacaccccatgtcatactgcttttaaatagtgctctggactctgtctagagcacctatctgcatacctgtgtggtttgttctttccttctgcctccctgtgatcttcaggagatcctcaccctggcattattctgtaagataatgactagtgttgccagactttgtttggaaacttccaggaacttcaaattgtgaaacacaatgtgtttaagagagtcgctggcctctggcctctgccttctcagttggacagtgacaccagttcaggggatactgattgagggattatcagcactgacacatggtctgtccttgccctgggctgtcataagatgccctgttagatgtggagctacaggctcacatgacatgcatagctctcctgaccatgcctactgccccaggtcctcatattgaattatacatggcagaggctttctgcagagctgtttttttccactagcacacaaagcagagttggaggaggcatcttacacagtgagagctccaggccctgcagaggcgaagctaccacaaagctgattactttccgtctgagaggcctgtcagcttgggggtgatgtaagtgggaagtggagacctcaagtgtaactttctatttgagagttagttccttgagaacatacacgcagaatcactcaaagttcaatatcaagtcatttggcttttgagacaaagagagagaaggaggcgcaatggaaaggttagaagtgccaaatttaactttctactctggtgaggtaagatgtgccttgggctccatgtacatctgacccacaaggtttcagttgaacgatgttctgtggcagtgccagtgatgcacacagacagccagtggctcctgttaactcctcacgtggatcagacacagagaccactaggtaccaatgtgtgagatgttacagacccacagggagccattgaaagcaaaaagatgcacccgctgacagtggattcaaggagggacaggggagattacataaagtattatatctaaacagtcaatttggtcttcaggcacccacgggtgaacctactattattctgagaaatatatatagtatcaaactatccactgtttatatctctatatctatgtatcagtgtacctatcatacctcataagagacatttcttcatacagtggttggtgtttaacacagaaactcacaactggtcatagtgcagaggataaacatctgtggaatgctcagccacaagtggaacatctgtatcaccacccccatccccacaaagtttcaggagctgtggttaaaggtgggggacagaagtgagggagggctgtctgtgtggcaggacctctgcgtgaactcatagcagccatggttgcttacagcagacctgagtgtggtcaagccatgcagcactccagcctggaggagagaggggctcatgaacaccacatcggactgaagaccagtcagataatggctttcaggggagggaaagtcagtttcctttattgggggtggctcctggtaagcttactacactgtagtaaatgtcccacatttgggagtatatgggcagcacaaattaaacttagtgggttatttaaagaggggcatgaagttggggttggggaagtgtcagtcagtctgggaggggttagggtgtggactaagaggtcaaaacataaatgaaaattctcaaaatttcataaaaaatattacatataagaagaattgtcagcttccaatgggatagctatatcatcaaatctttgagatcatggcagatgaggggacaagagatggtgagagacagcagtggtgggtgactgcaagccaacagtacacaaccgggcatttaggaactcaaagcagttgtgatagcatgcacgaggccggtgcaagcccaagccaggcaagnnnnnnnnnnnnnnnnnnnnnnnnnnnnnnnnnnnnnnnnnnnnnnnnnnnnnnnnnnnnnnnnnnnnnnnnnnnnnnnnnnnnnnnnnnnnnnnnnnnnnnnnatcacagcctggagaggggatggggcgtggaaccccacccccatctggggagttagtagcagttgatagctcctggaagagggagagtcttctttaagggggtcccctggtagactggtgacacaccaggggttgaccctacaccctagagaatttgagcaacacaagtttgacttgaagagttgtttgtttgttttttaaatagacatcaagtagggtagagagaaaagtgggtgggccagggaggagtgggggagaagggaattgaataggaacccaatgcatcatatgagattctcaaggaattagttaaaatattagtttttttttaatctccaggaagtgaatagtcccatgtaaatagtctcactgtgtttgtgtatgggcctggcctggatcactcaaattatttctctcttattttttttctgtggtactaaggattgaccctcacacataccaggcaagtgctccaccaccacatcatattgcctgtctttgcttcttttctcttccttccttccttccttccttccttcnnnnnnnnnnnnnnnnnnnnnnnnnnnnnnnnnnnnnnnnnnnnnnnnnnnnnnnnnnnnnnnnnnnnnnnnnnnnnnnnnnnnnnnnnnnnnnnnnnnnnnnnnnnnnnnnnnnnnnnnnnnnnnnnnnnnnnnnnnnnnnnnnnnnnnnnnacacacacacacacacacacacacacacacacatacacatacacacacaaaggcacccatgcttgcatgaacacatgtgtgcacatagtgcacacacacatacataaacacatgcacacacacacatgtacacacacagggactggactccctggacaccatccaggatattcattccactctcaggttgctcttgcaggtcctgcagactcccagtgacctttcacaatacccaagcttagtgcagtattgacagtttggatagtaactgggtttgttggtaaatgctggtaagcctagctacttagaagcctggggcaagaagatcactagtttaagtccagcatagataagttagtgaggacctgtttcaaaacataaagaacaaggttgggttgggtgatgtcattcagtccatgggagagtgcttgtctaccatgaatgaggcacaaatttcaatcccccactacacacagtccaaaaccaagaaagcaaaagaaaaaagggaaatttcaagtttgtttttctctaaatattattcatttcccatccatttgacaggtggtgaccaagaagggggacttcttcagtgcctggaactcctgtatgcaccatgtcacctcattgtctctggcacacattcacagaggtgagttggctcttattgaatgttcatggctgcaaggctcaggtttctgaatgccacaggggaacataagtctgtagaagggaaatcttgccatcagtctgagccttgctgctggatttagggccccaagtaactccaagaggcttggagcctattgtaattcaaccccgtgcttattaagaaaactatccagataatggtcagaaagccctccaggacccacttaccagacaggagctggtttgtacacatcaatcttcccagccctttgtccaacaacatctggaatctctgagtaaataaatggagaggatgtatgtatatatactcaaaacaaaacacaacacaacacagtctgatacaaaggctactgtctgagaagttccaagcactataatagctgactaaacccagtccttaaattaggtggctgtgtcaacccataagtccctgattctcagctaaagacagttttacctcaagggaatatttgaccatgtttgaagatgcttgcattgtttgatgggagcagcattattggctggtagtaggtagacgctaaaataaatgttaactgtcctataggtcacaggccagttcctacagtccattatgtaaataacactgagactaagaatattcatttgatctaaggaaactaaaatagcacaagaaaatgaaacattaagtatttggattcatgtcattgaaattatttaatgttaagaatcgttttattcacaacatgacttcactgggtgagtaataggtattaaaagaaaaagcccaggctctcaccaagccttctggctgtgtggggcctcttccatcacatggagccactgagggtcatccagagcagggccaggttgacacccccccccccgcaccccgcccctagcacgactgcaggggcatggctcctggtgcttctcatctcgaaggagggaattcttcagtggaagagtcagggcaggtattgtggccaacaacccaggaatgaacatatttgaggaaacttcccagcctgcgcactattttccaaaaggaactgtgtagcttcagggattcccagcatccctcagggctggaccagaggaaatgctttctgttcagagggagtgtggctacttccctctctctgaggtttggctctgggaactttgtgtgctagagcgagcatcttaattcaggccagtgagcacaggctggaatgaggctgtgccaggaacacaggttcttcatggagaaaggaagcaaatggtccacaagaggccttcacacacagtgacccaaccctgcagtaaccagcaccgtatcagcagtcctgattctgattgaattctatcttctgatcattgcgacaaggaggaggagcaaggagagggacagacaggaacggggatggggacagcactcacattggattccctcatttagagatccagacattttacctatatgtcctgacatgaattggctgtgaggaaacttattcatagtaactgaacttagaaacgactggtataaaccagaatgccagtttattcatcaagtcaaaacccacctgcaagccatccctcccctgggcagcacgacccttggagttaagtggtaaccgagggggtaacttatgctttcagggctggctgccaatctgaggatccacggtcaggtcagctgccagttatcctgtaggtcacaggctacttatgtccctgaaccaactatggttccagccacatttgcttaagaaatttgtgaagcacaccgaacacacagcaccccagcccatacaccctagttgaaggcaggcatgtcccacacatctatccacagcatgcatcattcattggcctcattctgggaggtgttaaggtgctggggatcttccttctgggtccctgggtactgaccgcagatactgtccatcccaaaacccagctctaaggtgaaggcatgggtcatctttgacccccaattctcaaacatctctgaagagccgttagttttgtgtctggggcttgtatggttcaccttagaggcaggactgggactcttccagtgactctgcaccttacaagtatagttgagtttggtgtgaggtctgaggtcacttgcttgagaggctggatatctgggctcatgccctggctctccttctaccagctctgtgactgcaagagagatgcccaacttctctgagattcatttacagagacggtgagactatggcgaagatgaatccagagaatcctctcaagtctttgtcttactgtctgactcattctgcggaatgcaaagaagaaagctgttaatcactagtctaaaaagaaacaaaaacaccaaccaaacaaaaaattaaaaaaaaacaaaaacaaaaacaaaaaacccttagtttctgtaactgaagtagatcttgtcccttaagaggaagttaaacaagtgtgagtgtttgaggtctgcgtgcagggaagaaacatcaaaggtttgctgtctcctcagcacaaaagaaatccaatccattctaaactttcagttggctaatttttttttttaagagagtgattgttttcagaaaattaccctcaggtttaagaccagatacaaagttcttgggtatataaagaagaacattaattcaatgacagtgtttagggaactcaggaataatttataatagaaaactctgtaatgaaaaggtttagaggctatggcgatgtctctgtgggtgagaatgcttactgcacacatgtgaggatctatgcagccaggtgtggctgtgtgtccctacgaccccagcaccttggtgggcattaacaggggatcactggggcttacagactgctagcctttctccaggttcaacgagagaccctgtcttaaaggggaaaagtaggagaccctacatcttcctctgtcctctgcacgcacaagtgtgcacctgtttacacactaatgtgcctataccacttacaggaaaacaaggtgtacaatgcaaaggtctgcacagacagacctgtgtcaggccctcaggataggaaggcacacagcctgcagcaggcaggtagatggagcccgtgttgctgccttcacatcctgccgccctccagcagaggtctccaggggaaaggaaaactgctaagagcccaacagtctttgctgacctgcacagatgttgcctgcaacacttttgaaggaagagcacacagaaggagagaggggaatcagtctgctaaagctagaccttaacatctccccagatggaaatgaactcagagccgagccacttttattaggaacaaatggggaggaagcgcctcctggcatcagtatcagtttgtcacctgaaggctggggaaaactcggcttgagataaaaatgttaagcagtctccagtggcttccagagtgggatgtagccattacagtgataaattgatatttttctgtgatgcacatatttatcttgccctagaaagagcagctctgaacctcatggtatctgaacccctaagggtatgccccgttccaggcaaaaaagaaaggaagcactcattaaagaaagggtagcatccatgcttcccagctccgtgcagaacggtctatgacgtttctcagagctggtgagcttcatgcagcaggaagcctctcttctgcttcttaataaagtgcctgataatttggaatgtccgcgttaagggcaggttgtaattataattagaacacagaatgccatggggttctgcctactgagaattaatttcagattcctttcaaggacgtgtgtgttttgaaacgaggctttctttgttaataaaaacatgatcgcatgcattatttaaaacagcgtgtcgtgttttgcccattagtgctgattccaatattcttcgtggggctggcactttccctccagttgtgaatggagttagtctttggacaaattgcactcgccttacttagcttacacttgaaaccgttttctataaaattatgaaagtagatttgccacctccttgaatgccttttaactgaaggccacctcttcaacacaatcctgtgtgagtctaggaacttgtcacccattataactaccgaagtgtcacccccatgccaccctcagcccttaaacctgaaggacacggttttcctttgatagaaccagaagtttcaagtgaacttatcttactgtgtggatagtgagtttgcgcagtgttgtgttgttcctgctggagactgaaggtggagggtgctgtcagaggggaggactcgaggacctgtgccagctatgacaatgtgcttcttctctcgacgctagtccccaccaacctgacacacaaactttaccacagtggcctgtgcagatccctatgtcttcgtttctcttcacaaaacaacttaatggagaaaggttgcttccctctcacagtccaggagcacagtgctgaggtcaaggcagtgggagcctgaagctctgtttcctctcatccacagtcaagcagagggaatgaacacaagctgctactcagttctgcctcgttgtctctgcagttcaggatcctagccacagccgcaggttttcccacctcaatcgccgttattaacataattctgcagggggattccaagaggcccatctttcagagaatactagattttgtctaattgacaatggacactagtcgtcacaccgatgagatgcaagtggctaaagggagggagtcctcagtatggctgtacctggtcctatcttctctgtgtgtatccacatcacatacatgaatgatgggactggccagggatctagggtgctgagaaagggcagatgtaattggctcacagttctcagcagagctgggcttttggagaccccaggaagggaagggatgtgccagcttgtcctctttctcctgtcagatgttcagctcagacccatgagtgtattctgggaacacaaggtgctcgttgtacagggtccacattctacagaacctcctatggcttgttgggggaatagttacacatgctctgtgtgagagcccaagaagtcctgggtctctgggcctctcccagatgaagtcagaaaaacccggaaggtggtaatgtgatagaaaagagtaagaacccatgttctctctacacgtgttcaaaagggacagccatgaaggtgagccttttacatggaatccattttaaatgggagtgtgaggtactttgtgctcttcaaaaggatcatgattaaggactggtgagatggcttgttgctcacccagaatgacgaggttcagctcccaacacccacacgggcagcttaaagctacctacaactccagtcccaggggatctgatgtcctctttgagcttccaaagtcatctccatacatatggcacacagacatacatgtagacacacacatgcatgcacacgcacgcacaaatatcttcttaaaagaactctgtattttgattggttgtgcttttctgtaatggtctctgttgcaaagggaaatttccttgatgaggctggagactacacttatgtgtgtataaagacaaatatttaggatgtaattagagattatgcgggttaagtaaagcggtggtgttaggcctcttccaagatctatgacttcactagccttgcatagccagctggcttctagtatcagatatgatttccctcttgttgagagggttgtaagtccatttggagagttgttggttcctgccagacatgtgtgccactactgcacccttggacgtatcacactgggctggctgtagttatatctcataaacggtaaagcgggtagggttgtgggtcgcttccctcctttggaagttttcatggtgtcttctggtaccacgaaaactagccctcaactagtcttgaagagaatttcaagtcagttccaaactcagggatatctgggccctgtgtctgcaatgcctggtgtctctattaatagagacttaccgcctacctctgggggacaaccaaggataataacagtagtctataatgttttgggaccctcttggacaaccatgaccagcaagcagctcaaaagagggcttttcatgcctgatgtgagggtttctgttagatggtcttaggctcttggagagagcattgtcagtccagatggaaattgttcatttgaactacatatgtatacttatatgactcagggtattttaggtatttttaggtagatagttaatattatgattccttttggctttttccagacatctttactgctagtctaccctcctgtagttaccttcctccccacccctgctcccattagcttccccttttccattttcctgatcagatcacatgtactccactattctcctctctattgctccccccaggccccaccatgtcaatggtaccttattttcctgagtattgcagttactccagactatgcatgcacatctgaagatctggaactagaagctccagatgagagaatccatgtgatgtttgtctatctgggtctgggttacctcatttaatgtgttcgtttctagttccatccatgtactgccaaaggtcgtgacttcaattttctttaccactgagtaatattctatagagtatatgtacattttcatttacctcttgtctgtctaaggctattaggttgttcctatttcctagctgttgtgaatagaacagcactgcataaggctgagcaagtgtctgtggagtcctttgtgcacatgcccaggagtggtacatctggatcacatggtagtctggctgctcagaatcactgaaagggcaacaggaatttaccctccctggtttggaaataagttcctacccctttgtttctcaccatgtgatttaacaattataacttgtacagtaaactgcaaagatctatgtcagcattctgagctgactataagtaaacatgtagtgtgtatgggggaggggggaggacaaggggaaggaacagtaagtcatctcaaaataagattccctgagtacccatgtgggtggagaaaatgtgagagagtaaaacagaataggtaggcttgtgtccatgagcgtcaggattaagaataagagctttggagtttcttggtcagccaatctagcccaagcagtgatcccaagtgtagggacaaaaactaaggtgatcagccataggagatgacacttgacatcaacctctggctgcaacatgcatgtatgcactcatgggcacacacaggcacacatgcatacatgtacaaatgcatacaaaataattcaaaatcttttttaaaaaaaagattaagaccttctacaccatcaataaaaaatagatattgggagggtatgggggctttggggatagtatttgaaaggtatatgaagaaaatatctaacaaaaaatatcttaattaaaaaaatagatgttgcacaaattcttgccttatcatggcacttctggatatgatgttatatatttcttaaaaagcattgccccatagggcactgtaaatttagaaatatttgcaaggagcacacacttaaacatgagttttaaagggcagcatattctagtctccaaaacatttagcaaataacctttgagttcacatgagccacccacacaaaaaccaaaatgaactacacagaaaaaaaaattgcaaaagcaactgtctgttgacaaccagattttctttcagccctcgagttctggtctataaataatccgtgtgtttcgagtctgaccattgtcttcagaggcccctcctgacatattctcagttcagggtgtcttaaaacaaatattaaatgtgtaaatcatggaaactattatgtttttagagagctattggagatatgtgctttttagatacccaaagtgtcaaaatgaaacattaagatgatgtattctttctttggagcatctgtttatcttttgtgagatctcaagcttgataaatcaccagagataaaaacttcatttttaacttattgtaaatcccaaatgctgagaagaaaaatagtgctgagtcttctctatgtgactttccctctctctctgctgatgacttacaggggtttgtttgcagagaaaacacgaggctctgttgactgccgagatgatggcttttgctcagaaacctgagaactgaaggggaaagggggaagcatgtgttgtcagggttgataatttaacgtggtttaatatctgcctaaagtggcacagggtgaaagacaggagaagaccacaaggtaattcagagagaagtcttaagaatatttgagtttttatttttcagtttgtgtgtgtgtgtgtgtcgggggtctgtgttagtgtgtacctcatgtatgcaggtgcctgggggagtactaaggtgtgagatccctggagctggtgttactggtgggtgtgaatcatcaggtatggatgctggcaactgaacttgggttgtgtacagtagcagcaaggactttcaactgatgagtcttgctctttctccagcccttaaagtaaggtttttactagtatcttatgtgcatatgaaaactgtgatatgaatattcttctgtatccaagaggaccacaccaagaaagtatagcgatggctctcagcagttcttactgtaaacttaaagatcataaatgaatcaatcaatcaacataatgcctgggcatgaatgttcaaactcactgtgcctccgtgtgtaaagaggtccctgctgcagtggtgccccagtgtctttccttgcccttacgctgttgttcttcagccctgagcaggttgagataaatttaattgtgtgccaacctattctaggccacagttgaggggttttttctgataactgccacaaagtgctgttttaaggagatagcttctgtcctaggtctcagaggttactaaagttcccatagcacatggccagtggcagctgtgagcaggtgacctcagttttcccttctctctcttcttgtaagaagcacgcgagtcatgataaggagcaaaaccaagggcattgcctcctgccacgggactaagatagccagatgttctggagtttcaagtctcccaccattttctcagaccaacagctatacagtgggctagtctttacagcaaaaagctattccacctgaattactgtatcaaagggttgcagtccattatggtaggacagaaatggcaggccagctctgtccatgggggcaagaatgtgtggcagaagatgttctcaccacaacagaccaggaatcacagagtagggggttcggggaggcaggaccaggaattaccttcaaaaccacccctaatggtctgtctccactagctaaacacaaatccaaacatttctagaatcttccaaaatagcacctggggacaaagcatccaaacagaggtctccaggaaatctttcagatttaaatctctccactcatgcaggctttgttcaggttgggatggagcctagggtagtgcatcgctgtgcccggttggttgaggcagcctgcagtgtttgtatgcaaggctccgctgtggtaactgtcagcagagcagtggtgaaggacaggtgtatgaacccagcactgagtccagcagcaagagggcaatccagagagattagacagtaaagggtccatctatccctgtcaaaggaagaggactgaagttcagggatggcagggaattatcttacgcaaacaccttcaaaagtgaaataacacagtcaaaaccacaagtaggggaaaaagtctatgtgcttacttagataaaaaccagtgctcacatagcaggcctttgatgagagactggccttagatacagaaaagaggaaggtactttatagaaactgtagcatgcccagaaccagtaaggctaatttaaatatccattaaaatctgttctatgagccatcttgtgttttccttagccattctgttggagaaagttgaggaaaaatgactaactacatctggggaagtctggggcttgcttgggtcaacatctggggacatattatgcttcaaccacatagtgaattaatgcagtggaaatcactgtggaagagggtagttaaaggtagataccaaaggtaccaaggctgttgggattctctttacggagtcactggaatggagattgagtgttttctcaggatggctcatgcagtggctgaacctaggactttctggtggttcccacggatgcgggctggccttgtgatctgcctagcccactgtggggaagtcactgacacggatttcagcccatgtagtgagcaggcaaggaactctacatgcccccaagcagccacacccagcatgccatgtgtttttgccataaccatgaggttgtcccccacatggcagtgctggcagtccccagggaggccactcacctttctgtctcttcccttccagttgcactagagcagttcacgacggcagtgaggcaatgtcccaacagggaggaccaggctttgctaatgaaggtaggttatcagctaaattcttatttccttaaagcctcctagcgttttttgattgcccggaggagagcaccggtttttgttttttttttttttttttacaagcgggagtaaatttatcatctctgaattttgtgctccacggggatacacttgtcagtggctggcgggagggtggctggttaatgagcacaaccacagtctgtggaacacagaagtgacagggaagtgggtgtcgacaactagcagggagcctacgtgattctcagtggacctggttggttttatttaaacttctctgacagtctcgattctttcagcagatttatgagacttggccaaattccatgtctccgatttatactttttaattaagacaaagaatcccacaccttcctggttggccccatcctccctatcgtcaccagcgggaatgccatacaaatcagaccacttgtgtcaactgtcgagacagtcaactcatgtcttaggttctttgtccttgaatcgaaaacaaactccttttcttctcaggaataaccattttatctcttccctgatggcatggacagaagtgcggtataacctatatttagggtgtgcatttaggagagccgataaaggtcaggcaaacagcctgtgcaatcttaataaaaactgtgtctgaaggcaagaaagcggctcgcaagtgtagagacacacgcacgtttccactgatgactaagcctcctgttttcacctagaaatgtacatactgaccttgaacaccagtgtttccatgatgtcatttccatcctgtgccttcaggaaaccgtgtataccaggagttgcatttctttacctaaatacagtttctttaccaggtgtcttctgacttgagaaatgggtgggaaaaaaataggatgttactcttaagggatttttcaactcatttgcctaaggggtgatatttttggtctgtctattttttttgtttatttgtgttatttttttaactttcaatgatgcttattttataataaggaaggtctgctgattccaagtgttgagttgatctgggaagcccagttcatctgagtccaggctgtgtgaggccctgacttggcctgacagatttaagcacatgagatgttttggtagtctgaggtctcccacactgatgttcattccctgctatgagctccatgcctcagcctgtccttccaaggactggttggtttcctgtgaccttgaagcagccttggtcacagacactcaccttttatccattatccattcatgggtcaagacacagaaccttcgtcctcttcctttgcattctgtccggcatcttctctctctcctctcctgatcacctggacccctgttcagggggagagactactgggttccattccgtcctgtaagtgagcctcactgaaacttatgtgggcatctcagaggtgttttcagagaacagaaccactaagctcaggaggccacaccatccggctacttctagttgcccttgtggtcatgtgtctgagtccctctctcgatttcttctgagctaagacaagtgagtaaaaacagaagctacctgaaggccacccctcctcccaagctgcctcctgttgcctctcacggctgcaccaggagagacggctcctttagtccacttggttagacataaacacttggacttgggagaaggtcaagctttcccaagatgttttggaatgtgtgtacctctcaggattttgtgttttccttcatgtttcttcagactgtatgaccacactaactgagagagctgtctgtgggtgttttttacagtatcttcgagatatttgagcaggcctcatcaaagaagtttcactgaacaaaaatgtgtgctttgctcatatctacgaagactactttgtaatttttttttcaagagattgaggtttctttcatgtcacttaggagaggccaccatgtgggtgtgacaggaatgtgtaggatttttttgtggatatgtataaaaggatgtaagagaacaatagatcattttgaacactcaatcagctgacccttgatgttcactttggtgtacttggagtttatatgtagtaaaattcttttgtgtgtacgtgcatgcatgcatgcatgtgtgtgtgtgtagttgagtattttgatcgtatttgtctccctcccccaactcctccaagatccatcccccttcccagcagctgtcaattgccaatagctccttccctaggggtgggagcccaactgtgtgcccaactccccttaactcccctctccacactgggatttggtctgtatttgcacaagtcttttgcatgctgtcacaaaactgtagttcatatgtgcagctatcctgctgtgctcagaaaacactgtttgggttatccactttctggcccttaccatcttcatataacctctgctacaatgatctctgagccttgaaaggagcaagtgtattataaatattccattcagagctgagcattcctaagtctctaattctctgcactttggacaattgtgggtctctatgttaatcaccatctgttgtgaaatagaagcttctcaaggccttcaccttccaggcttccgttcctcccttggattatagaaggttgagaattcattgacctgtatgtttaatgataagtcattaggagtcaatttaatactgtgtccacttagaaaataaataatagcagattttctcacctagtacctgtgacctgtgtggccataggctcttggcccattatcagatctagtatgagtttcaatatatggagcagagcttaaatccaatgagaaagttgttggttacttacatgatgttcctgccactattgcatgccttggcaagctaatcattgctgtagctcacaaaagtcacagctatataacattgatgactactttccttctctaatagtatatataaaactttcagaatgatgaaatctagccagtagggatgaagcatacaggttaggaccagtttgatttttccatgctcatagtcacaagtgtggttggtatcttcagcaatagggtcttactgtagcttctggagtgtgacctataatatttgaggtctatgggacctcatggaacaacaactccaaaaataagtaacccattcttggcacaagacttttatttattagactatgtatctagtagagacattgtcaccctgttttggattaactctatcttaactcattttatgagtgatatatatatattatatatatatattatatatatatatatagcatataatatatatgatatatatatatatatttctttgaaagatccctagtgtcatttatccttccccatattccctcttctaccctgccctctcttctcccaccacaatctaacacttcctattcattattcttctttatacattgcaatttttgacttctccttacaataatttcttgggatccaaacaacagcaacgaaaaccaaaacatacttgtcaagagtagaccatggccaagcaggtgatgttcctaggacagtgctcattcactgcacttggaatgtactgactcttgttgggaaacttgacttataatttatggttgtagaggaatacactttcaacacttacacatgtggtagggtagtccaagtatattccatttccatgcatactgttgattcctccagtggtccaacattactgaaaacagaggacaggtgctttagtctaacccatgaagatgttctatacatgcacctccaagaagacagaagacatgagcagcgagaacatacagctgcagcaaattcagatacccctggaagaaacagaagcagcagaactcaagatcgtagaagccaaagcttttgtccaggtcagaataagcaacaagtaccagaaggtaagaggaccaacagagaagccctgcttccaatacctcttcctccccagcaccttaagagcacatacaggaagccaggctttgatggagtcacaagacacactacagtctcgcaccgccatgaacgctgccatgctttctgaaccacagaaactgaaacctctggaaaccacaaggcataagccttttctctcttaaattattcctgttgggcatttcagtcatggctttgtgtaagtaactaatgccctctctcaaccaaatagtcctaccttgcctctccagcttctctctcagcacttgtgaagactcttcggtccccattcccaccaggtttgtcctaacacgtttgaaacatgtctttggagggtgacagactaccagtggtcagcatctaggtgacactgcatttgggccatcatgttctagtctgacagtcacccctcctcactttgctcctgcagctcttgctctgacacatctaataggcagagtttgttttccatctgggaagtcaggagcctccttgggtctagaacatctcaaggccttcaccttccaggcttccattcctcccttggataaactagaaaaggaagtagtgtgctcatgggacagtgaccctaccggggagctgccactactcctagcttaggtgacaagtgctgaaggacacttggcttatgccatccctgaagcaagacagtagcagcaaggcaccccctagccagtgagtgaccagactaaagtccccagcctgggcctggctcagtttccccgcctaaggctaggacgccttgtgagggtgaagatagcccttcctgtaggtagaagctggcatcacagcacatggcccacaggaaacagtaaaaaagaatgaagctgcctgtggaaataactaaataaacaaaccaacaggtagccagcagcttatcacgtagccttccactgctgctcccaaactgtagagcttttggtagggctgcctaggaagtggtaaccacagtgtgctggcctgatccctggagtgctctctggctgggagggaagctgagctgccttgtggtgggatggagatactatgttttaaggagacatgataaccgtctctcttggttcctatccacctggcagcatacgcggtgcccactgaggatggtggacacagctgtcaggtgtgatgcctgggctgagcaaacccacagagatcatggtgaatttgcagggccaaatgcttctggaagcttctttaacaccataccacccacaaagcattagtgctgccccaggtgcaaagaggaacctgggcagatgtggaaagagggcctccctctcacacattctcctgccactaagtctggccagatgcaactgtttttccacctaccagtgtttaagagaccagagacactggaacctttcttcaaactagaagtctcctagttgcagacacgacccggcccttgagccttctacatttaccaagtcaacctcttccagaagcaggcattttctcctagtctggtggaatcctgtcaggagtaagggctttcaccaggaacacaatgcctgtgccttcacttggaaagggctgtgctgaggagaaaggagattttccacatgacggctccactgcgctgcccccctccagaaagttcagaggcgcccagcaagctggttgtctagtgtctcttaaattgtcattgtcacaaagattctttctgcttcatttctctcaaagttccccttcccccacactgcctggccaaagaggagtgcctgagccattcagcatctagtatggggcacagtgctgagcctccacacaggtgccctttgtgtccttttgtgcttagaagagacctttggttcccaaagtgtactcaccaaggcaactaagtctccgagcagagctttcagaggggactgtcccgccctgacaggcttctggcaagcagcaatttgcgcctgtcaagtgggcgaggtgggtttttccctctttcctgactctaactgctctttcttccttttctcaatgtgtgtaggaggtagccagtttaagaaccaaacctagcaaccaatggttaatcgcaaacacctctcctcaagcactaggccaaatatgatgtcctttcttctgcaggtggcccttttcaggcccaaagactccatccctagtctcccatcagcaaaagtttccccttgtcccttaagtcatggccctttaggggctgtttgttgtacaggctgagtgccccaaacatgcccaagaccaccagtcagtcatctgggactggtcatgggattgagcctcccacacaggaagaaatgagctctcatctgaagcttgattgcctgtccaaattcagtccaggatgaagagtactggtgcgtgttctgagtcccgttcatgccatgactggtgtcagggactctgatggtgaaagccagcttttagccactgttctgttcccatggtcttttctattccttgcaaccaagggccacacagacaagaatgcatgagtgaccacaacaatcctaagaaattttatgtaatgaaagttggctgggttcctattatgtggctgataaagtttgaagcctggctcctttgcaaacttttgtctcaatgcttatgcacatcagaagggaaaccgatactgatgatataaaaatcagggtcaaaccttgactcccagaaagaaatgcttttctctccttcttgtcacttcttgtcacttcttgtcacttcttgtcacttcttgtcacttcttgtcactggaaaactccccttcatcacacttggagggcttctcacaagttaagtgtgacaaaattctgcagagatctgcttaaagcactccaccaaatctcatcccagtgtaattttaattctggaagtaatctctggtatggacaactaacctttcagcttgtaggacttttaaagtcaaggaataatggtggactattgggcccggtgactagcaggcagaagagttatttcccttgctgttgtgcatatttgctacaattccatttctaaagcatctgtgggtgcctgttatgtgtcggactctgtgctaggcactgggtgtgcaaatgtcagtaaggcagccgctacttttgtatagaccaaggtaactaattagtgacatcactgcacccaaatatgcaaacaccctggaatacaccaagccccgaggaggatagccgaccataggggagcactcagctagactccaagtcaacatgggtttagggaggactcagaggaggaggtggcattggagcaaagtgtctgtatctccacaggaaattaaacttagctgactgtgtgctccacagcacttatcagtgctgttgacgggacaaggtatgttctgagtttttcatgtatagagtcgtagtttaagtgcacccatgtgtgatgtgtgccttgaaagctgatgcacaatagcaaccctgacaactgcctccccggagggagccctgagtattctgttccaatctgcgaatttcccccacccgacccagaggtgtctttagatagcatttagtgttccttccttggcccggaaaaactgatcttcttgagtgggtattgaggtgttctgggagagaatctaacaaaagctgccatgagtagttgtcctagaattgttctgagagtgaagcctctaagccagaagccaagggaggagaggaaggggcctgagcactgcagggagaaaggtagaagggtcttgtctgctgtgggattctacactccaaccatctcctcacaaagctctctgcttaggagaaaggggccaatgtcattctgtataactatcatcaggctgcccatgccctttgtcaccatggggacacacacccagatggaagcggttgcaaagttgtgtacatctaaccagcccttgttagattgttaaacatctaaatcaatagctaagcagaaaagaagctaggtggcagaaatcctcatgtttgaaaatgtagcaagctgctcctccaagcatggcaggctcagctctctggggacctacccatgcatgccaggcacagggcctgtggcgattaggcctcctggcatactctgtcccccatttcctccatgtacagatgtacagagtagatttccttttaagctgcaacttagaagacagggcaagaagacggcaatcacttggagcaaaggcgtttggtgggaatcacacacaggaagctgagagcagcatttagctctaagagacagggcagtatgttgagggaagagagcccggtggacactgcccatttttcagtactgaggatccagcctagaagacagtcacacagctgtcctgtgtctagaagaacacagatttcccagaagacagctaaagggacactggtgctactgttatgggaaaagtcacactgggtggctgacaaggtggtaaactccagcactcacaggaggcagctcaccaccagtcacatctgcaccctgagtaataacaggaatcgtttgagagttcacgacttctgctctctacacctgatgaactcttccttttgtccttactaaattttagttgcttaaacttggttggttttatgtttaactttccattaaagaaaaaaaaaaaaaaccaacaggatgtcagttatagtatgtggtgggaagggtgaaggactagttaggtttcgtgctttcttctgccagaatctaggcaggcagcaaagagaaataaaaagagagaggaacagaaggagggaagggagggagggagggannnnnnnnnnnnnnnnnnnntggatttatattttattttaatctccacctcccatatgacaaggtttctttgtatatagttctggttgtcttggaactcgcctggcctggatcacacagagatctgcctacttctgtctcctgagtgttgggattaaaggtgtacaccaccaccacccatcaaaaatgtattatgtttagactaaaatagtccacatgaagacaccagctaagcaattgctgtcctttctcaaagacttctgctgaaatctttccaactttgaggaaacctttcttccttttctactccttctggactgtcaaggactgggtgggatcaagataactagtattctgaggccttagccaagtgggaaagggcagctcagaacggcccatccacagtgtctggttaatatattacattctggaagggctttgtacagagctgaaaacactaaatgctaagactgggagcaattatttacacaaggctggcttgcctttcaaagtaaaagacccagattatggaaacaaaacaaacaaaaacaacaacaaaaacctcagaggtattcatggctattatttctgttaaatgtaagaagtcacttaaaaatagacactggaagacagacaagctgtaaccctgggcatggagtgcacatatggagttctctgcatcctcagaaagcttcatatcccagagttgccgaaaacaaaatagaaagttagctcaaaaactgggaaaacctaccatatactgccacagtggcatgaggaagaagagggggaagaggagaaggaggaaggggacaaagggtacgagaaggaataagaggagaaagaggacaaggaggaagtgggtgaagaggagaagaaagaggaaaatgagaaaagaggaaaaggaaaggaggaagaggaggagaaaaggaaggggaagaggaagaggaggaagaaagaaggaagaggaggagaagaagagaagaggcctgcttactaaaagttccaagaaggaagcagtccataaagaaagtgcctttgacattggttccagaatccagtgcaataagacaagaaacaacagaatacaagctgtatccttttagacaagaaagaagaaaagcaagcactacctacatgtgacatgcttgcttatctgtttaaaaggccctagcagctaggcccaactggcagccacatgctccagggggcctggggtagctatgaatatacccaatgcagaacagtaaactcacttaaatttcatgcttttcaaagaaatacataaactgattgcacccttctcaagtataaaccctatagatgatgatgttgtgtcacaatgtcaaatggttggacacactcagacgagtgtcaaaacaagagacaagggggcaaaagaagaaagaaagaaattaattcctggaacttaaaacggagtccaccaaagctatagatacaaggccaacatgaaaatattgatattatttttggatgctagtaatgagtacctggatactgaatttttgaaagtaccatgtacaatatcaaaaatgaaaaagctcataaatacctagtaataaatctaccaaaacatgtgtgtgggggcttggccatgtgagagtgatttgaaatgctggtgaagcaaatcaaagtagatctatgtaaatggagagactcatcccctagaggcttctatccagtaaatatataagttctttttatcatgatgtgcaggttgaacataactcctattttaaaatctcttattgctgggcacaaaatcattctgaaatttttaagtaacgaaaagcacctagaagagcctaaaatgtcgtgagaagaaaatgaagtgggaggcatcagtcagaacagtttcaactgttgtaattagagtcatcaagaccgcattgttggtagatgcacatggctcagtggctcacaccatgcagggaaatgcagaaatatgtgcacaaacagggccacctggcttgttgaaaaatcaacagcaaatccaacagaagaaaagacagcctcttcaacaaatggtgcatagtaatgggagttcatagacaaaataagataagaaagaagccagggatggtcgagaactgaagatgacagtaagctaagttgggatcaaaattccacaactctccattttcaatgcatgcaataggggtgtgcttctctgccaatgtgtgagtcagctttctgtgactgtaacaaatacccagactaagaaacttatatagaaaacagtttaggaggtatagtggtacaggcccatcatcctgagggctggggatatagttcagtggtaagattcccaacaccacaaaatgaaaggggagaaaagaggttaaagctctattttggctcaatgtttcaaaggttttggtctaggattgggtggttgccctgcttttgggtgcctggtttgggaaagctgtgtagtagagcaaagccattcattttgagccaggatgctaggaaggacagaagagcccaactcccagtattccttcaagggtttgaaccaatgaccaaaagacgtatcaccatgacctacctcttaaaagttccaagttggagttaaaacctctaagaaacaggtttttggagaacatttaagaaccagactgtctcaaccagcctgcacagtaagctatacaaggatcccgagtgtgtagcctagcatgcatagctagcttgctgaatttgttctacatgataatatctacaaggtggagagtgggtttgccagagtatggcaacctcaggctaactgtgtcaccgggttgcaggagaactatcttcctatcaccctcacttgccccgactcttcactagctcataaaaagatggtcaaagtctccttcacgtctttctttcatctccctgtgtgtgttgatctcatctcctgtgcttttcattttctgtcatctggagaccaggatgcatctgcatccagacttatcagtaaggcagacagaaggctgctggggcgccgggcgtggtggcacacgcctttaatcccagcactcaggaggcagaggcaggcggatttctgagttcgaggccagcctggtctacaaagtaagttccaggacagccagggctatacagagaaaccctgtctcgaaaaaaaaaaaaaaaaaaagaagaagaagaagaagaaggctgctggggggctgtccctgccttttgtcaactcctgtgtgtttgatacaccgtgaccccagcagcatgtgggctgtcctgacgagaaatcacctctactacagaatatggtgctaaagacagagccagccaaagagccacatgagactccatccccacctcccactcctagaatacctagattgtgactgggttgggttttttaaaacagggacacatctccaaatagtttggaagctgaactttaattatgagcaacttcctcaaatggtcaaataaaaggacactaaaatggacaccacactgccttcccctgctttggggttaaaaattattgtggctgccttacctgcgctcacagctgagacctggaggggactcagtggggaacttgaaagctcaggaggtaggcattgctccagtccagcccaatttaagtcacttttctgatataaggaatgcccttagaaatcgcaaagctggtattttcttgctaatgctgacagaaattccttaaaccgggagatcgcaccatcgcccatcaattttacaaggcaataacagggatcccaagcggctaaaggctgaggccggaggcagaccacttcatcacagtgagagaactgggttgctgctgggggaagctgttctgtactcacgctgctcttcccctgtgttaataagctttgttcatcttctctgacaccacaggccaactagacccgtttgcttcatcccccggcttattatgcagccgggctatgtatgcaggccaccggcttgtcataaattgcaggcagcccccttagttcttctgtttcgagtcccaataggcctaggctcctgggaaccaaggctctcggaactcattggtttcacaaagtgcacatggggcccggatactggcctgggcacagtggggcactccaagatgcatgagcgttttgatcatgttgtgatcaaggagtgaatcacgtgcccagataattacaccagcaggcagattgtgtaacggaggggaaaaacatgtagttgtgagaacccaagaggcaagaagttatgttaatggaggggtccttggacaagatttaagatacagagaacttctaagaatgtggacgtttcagcttggagtttgccatttcaaaagagaggggcgtaggcatggaatgagacgtagagactgtgtaatacatgctcactccttgttgagcaatgagatatggtctgagaaaccctacggatcctgacacactcaagagacagagcaaacaggagatgaggctgtgactggcataagggtttcgctgtcagctgcttctgtaagagggaagacactacagatgatgacatgctgtctagtgagggttcagatcagtttatcaagcatcacaaaacacgcatcattgtattgttaaacccttcaacagttggtagcaccacaggcgtgttctcagcaatgtcactgcaaacaggagagacgctttgttctacagtgtcagaatgtctgcatctctgaggggaagttgttacatcactacaatttttttttttttttgtcttgagacaaggtctccctcaatacccaggctggcttagaacttactagacagctcaagtggaataaagctatcattcatccttctgtcttagctctatcacttccattctactcgtatgggttcatgggtggtctgttatagactgaaatgtcagacttagagtttaattttttttaaatatgtattttttaagttactataaagcctgatgattttgttcaggaatttatagaactgtgaattttgacacacaaagatttatgtaatttaaccattcctaaaatagtcttctgcgatagctttataatattcgtttctcctttctaatgccctctggaaaccagtgatgtagtctctgtggctatagttttctcttttaaaaaatgcataaatggaagttcacagccctaaacttttttatattcacatctttctcttgccatgatgactatgagattcagccaagttattgtaatgatcaatggataatccttttttgttgctgagtcatactctattgtatggatctacaagtttttctgttcacccattagaaaatgtttgctcactgaaatattcctgtgtggactgttatgtgaatataggcctttaattctctaagacagctttcttcaactctggtgcatctttgaatggtaaatgtctcccacgtgttaaaagtttaatgcctacattggcactgtaagagatgagaccctttgagaggttttagattaatatgagcatgtcctggaaagggtaggtgcgaccccagtctcttcctttgttttttgttttgtgttttttaaatgtatcagtgtattttgctatatcatacactccccaccagaggcccaagagtaatatctctggactcaagagttcaaaactgtgagctcaaattaactttatctccctatcagttggtaaactcaggtatctgttacactggcagagagctgttatactcacgagtgtatagatactcggcccatccagcctcagtgtttagggagggagtgttcctgcccactgcagggtgtttgggggtatccccagcttctacctcaatagatgctaataaagttcctcaatttcaatgagcagaatgactctatacattgccaagtgcaaaatccactcatgattgagaaccactcctccaaggcaagtgcactggggtgagctgagagctgtaagagaaataaatcctcgcatccccaagatgcttttggtcatggcctttagcacaagaatagaagccctaatagtgaagacagcagggtgcctcgctcttgtattttccagaagtagacacctagtgtatattcgtagtgttgttctttgttagatacaggtgtgattcaccaacaagaccatcacgcttcctggctgctttccagcaactttaaaaaggatagactcaatttctttaatctttgtaagactattctagtcaagtatttcttatgtgattcttggtaacatacaatattctataaactgctctattttaagttgagagatttgcatgagtgaagcccacagtttcccatatttccttttagtttctgtggggctgtgtagctttctgctacttcatatatgatgttaataattggtgtgtctcttttcacattctcaagcccattaggactgtgttaaatatgtgaatcataatttaaaatagcaaatgttggttttcatttatctcaaatgattttctgttttcatttttactgatatatatatgtatatatgcgtatatatatatacatgtatatatatgtatatatgcgtatatatatatatatatatatatatatatacacatgtatatatatatatatatatacacaccacatatcctgtatttctcttttgttgggttgctttggatttattttactcttggttttctaagattcttgaggctgacacttcccatcgatttttcttctttaagttaaaaatctggtatgaatttgcctctgagaactgctttctctatgtcacacaaggatttgcatattttgtcttaattttcttcatggcccttgagatttatttctctatttataaattattaagaaagatgcagtttagtctccaagtgtcaaaagactgtcttggtttctcttgttgttattggttacttggtctgctctatggtaattacaggatatacaatgtttttaatattagaaaaatctgacagtagagcaaagagaacatctggaaatagaagaaattatatcacaataacagagtgataaaagaaaatacaatatttcaaattcactcacagatatttaaagtgcgcgatgcaggggtggagggtggcttggtggataagcaagcttgctctgcaaacaggaggaacttaggtgaaaccaacacccacatgaacagatgggcctggctatgggcgcctgaaatctcagcattggcaggacagagacaggcaggtcatgagagttcacttgctatccagcctaaaatagcaagcttcttctaattcagtgagacaccctgccccgaggcagtaaggccaagattgacagagaagacactcaacatcccctctggtctccactcctgtgcatatgcatgctgtacaagcaggtgcaagcgcgcaggtgcaagcgcgggcgcgcatgcgcgcgcacaaacacacacactcaaatacatacatgtgcatgcgcacatacacataaaataaatctttttaaaaaacataaatttatgtagtaaaaggaaagtaacagttaagactgattatattaaaaacagaaaggccaggtggtgacccttgagaggcagaagcgggcagatcaatatgaatttgagggcaatctggtctgtgtaaatgagttccaggctagccagggctacataatgtcaccctgcttcaaatagaaaaatagatacacaaaaagacgaagggggctggagagagatgactcagtggttaagagtgcttatggcgcaaatgtgagaatctaggttgaagtccccatgtgaaaagtcactagggggtggacagacagatcacctgggcctgtggccaccagcgtcactccagattcagtgagaaactcggtgctgagagaataatgtagagagggatagaacaggaacccccctttctgtatgtacatgcatggatacatataccacacacacatatgcataccacataccacgcgcaaacacatgcacaccacacacatacaccacacacacacaccatgcacacacatatgcataccacataccatatacaaacacatgcataccacacacattcacacagggcacatacaccacacacaccacacacacacacacacacacaccccacatacaacacacacacatacctcataccaagcacatacacatgcacacacacacacatacacacgagaaaagaatgactagaagtatgaaagtctctgtgttgttaaggtctggtatttagaagttgtcacagactcctgatttgttttgcaggcagcagaaatcacagagtcagtagtaaatagtatgaatcactggagattgtccctggcactccctttgttggaccctagacagaaccaagcaggaaattcctgcacctcctagagctcctctaagctcattcatagccgtaatccccagtgaagaagagtttaatataaatgactttcctggcactgagagccctgaagagctggatgcagaagcctgggcccttggtacctctacctagatgtgattctggtaacctcaaagagccagcacccatcctgtttacacagacaagccaagagggcagcctctgcagagcctaagctgcattactgaaacaagcagactttaaaagccaatttacagtgtcagcaggaaggtaacccagaacctaaagaaaagagcagccagccagtaaatgccctgagagtctggtgtaggtgacagtatggaactaagcctgcattgtgtaggcagaggctggcttgccagcagctttcttcaattcagtggactttgacttgaatttggtaagactgggtgagaggctgatgttaacaccaggacttgtgatgggtatctttttctctccagttctactctcttctctaccctggatatccttgggaagctgacccacttagcatgcacggatgcgatctatcttagtttctttcctgttgctgtgacaaaagacgccaaatggatactttatgaagaatagaaatatatttggctcacagctgtgcgggaggctggaaagttccaagagcatggtgtccccatctcatccggtgaggggctggcttcttgctgcatcttagcatggcagagaacatcacaggacaaggattctagttctgttctttctccctataaaaggtgacatgctggtctcatcctttcaaaagctccacctccaagtaccattaacttgaagattatatctccagctgggggacttgaaggaaacatgttcaaatcatggcagatccttgccctctcaactctgttggattcagactccaggggaatagtacaatgttggaatttctctgtctccttcttacctccctgaggggagccaccttggctaatggtccacgactctccttagagcacatgtgtgcaccgttctttcagactacaacagctaccctttgtattcatcttcccatcggactctcccagccagagtttccagctgtaagaaactctattatccctcatgattttcctacatcttgcctacacatatattacatatatgcacatgtttgtatacccatgtatgaagatacatgtgcctgtgggagggcagaggttgacaatgggcatctttaattgttccccttacttttggagaacttttcactgaacctggagtttggtggttggctagattggctggccaatgaaccccctgtctctacttcccagttctgggatttcaaacattatctaccaaacccagcttttacttttttaaggggatgatgggaatccaaactgagctcttacacgtgaggccagcaccctgtcactgagctgtcttcccacctaaggccatcttcacaaaagccgttatcttagagatacgaaggtgaggagtgtttgtggatggagcggtaggcctgggctttgtgccacagtactacagaggggacttgagtgggcggggagatgaaatgagaaggtcagaggtctgattgctgaagcttgggtggagctgagaaggctcctgcacagcacgctcccacaatttgaaatgatgggatagtaaatggtgaagaagtgagtagttaaatgaaaagccactctgcctctggaaaatgagtttatttctgcttggtggctgcctgtgatgtcacccagtgtgcttgctttcagaaatgtaaccgggaaaacatcctgtaactgaggagtgatatttctgtgaaagtttaatcaagtgctgctcaatggaaaaatatcaagatggcattgcagggaatcgttcatgaatggaagggaggcaaagagaactacatgtgtctttcaaagtctattctaagtcacccgggtggggaggacgtgggggaagctacacgtgaaccaaggttgactggtgttaagatttctcgagtggaactgataccagggacccccttttactgtctgtcctacttttaaaacgtactttttatccaaaccatggccattcaaattaaggactttctggtttttggaaacgggatgtgttgtcccacatccttacaggcttcgtttttctaacgtttgcttgtttcctgtctcccactcttcagttttgtctgctgtatggaacgaagctggtgttccaggagcgaggctggtacttagaacataaatacctgacccccaaggccagcatgctgatcagggctcaggtaagaggagacactgcgcatgcgcagcagcagccttcggctcttggctttctcagaaaatgtccctgccactctgtcgccagtttctgagtgttgactttaggcctttaggactttgtgtgcatagcttcaggccgtgatgattctattaagtgacaaagactaactcactgtatatgagcttcctgacgtcgagagcagagacaggaccgtgtgttttccttgtcttgatggggatcggtattaatatttttcctaacccctccaaagcatattaattcgtccttcatattcaggagaaaaatcctgcggtaattttacgtcagcagtgacaatgaaagtgaaagctacttagcacctgtaagtaaggcggggccactaacccatcccagattgctgctgtagggatagagaccacagacagcggtggcagcagcggcagcagcgaagcctatccctggtacacctcctctgcagaggcacaaagaaactgaggactcagtagtcttcagaggggctcattatatcgagagtcccaatacagatttgtaaaaacacaaactgtagttaatatgcccaatgacactcaataagagacactcctttgccagcagttatcaattataagtagcatctttcttagggtggggctgcttccccttctcagtgctgggatcccactggcttgaatctacgtggtcttgtgcctgataccacagtctctgtgagtccgtatgtgcatcagtcctcttgtgtctggaagaggatgttccttagtcatccaagcccctctgactcttataatctctctacctcttcttccacatagatccctgagccacaaggggaatttgataaagatataccatacaggactgaaggctccaaagtctctcctttgctatgcattgtctggttctgggtctctgtgttaattcccatctactgtgagaagaagcttctatgatgaatctcctaaggaaggagagagtatagtatatatggaaaactagaatagaaggattattcaggaattttggaagggacaagtaatactatgtgccatttgaaaaaccatatggaaacctactgctatagaggtttcctaaaatatatacatataggaaaagaatgcaaatggagtcgctatatgttgaggaggacaatgcccaggctagacttctaatggcacaaagtaaaaccttgtgccaggaatgggctgtatcttgttgagttgttgaccaaaggggtcccatggaacccctaaacaacacaggccattgccaaggctatagactgtgcttcacaacttgatggtagggccctattgctgaagacaacaacacgtcattcatttttatcttaagtgtataagtggttgcctaaagacgtgtcttacacatgtaatgcagttgccctcagtggaaagaaaatgccattgtataacttgggactggagtttcagacagttctgaaccacctttgtgagtgctgggaattgaacacacatcctctggaagaaaagccagtagggtagaacagtcaaaccagcccctctgacacataaactttgagggcacaaatggctataagagaagcaatggataggtggcagctgcctttgatggggacatttctcaaagagagtactcgcttggaacttaatttaaaaaaaaatagtacacacagaaaagaggttagaagtatgaagagccagagaaccaaaacactacttaattatgtcttctagaaatgataggaaagctgcacccatgaaatctcaacatggtcagctggacaagatttgcataaagacaacagttggcatgccaacatggatggaggaagtctcacaaggccccactcctagatgatgacaatcagtggctgctatgagagggcaaatcaggtttcttcagggacaagctcatggttggttatctttagataatcaagctatcacccctaaacatatatacgtagaagcagtactaagttgactcaacaggtgttttacatatacatgagtgtatgcatgtatgtatgtaacaatattaaagaagaggtcatgaatttgagagggagtgcagggatatgggaggagttggagtgagagagaaggggtggagtgatgtgaatacaggacttacggagttctctagaattaatttttaattaaaattatgatataagagaatatttgagtctatggcagcggtaatgctgaactagaagaaacatatagcagaaggaggctgaatgaagaccaactttatgtagaacacgaaagagcttttgtattctttttgtattcttagagtgcaatgtgattcccatacttgtcaaccatgggactctcacagtatcctgggagatgagcaggaaggagccagcctcctcagaactacctttctctggaagggcaaatagggttgctcaaaggccttcttgttagatttctaggctgccaacttggagcatgcaagtgttctcaaaagggagagaatgaggaagctggtgcaccttcatcacctctcacctttatcatcttccctctccagcacctccccctccatcattccccccaccatcacctcccaccttcatcatcttccctctccattctctcccctctatcatttcatctccccctccatcatctcctcctccattacctgcccctctatcctctccccctccaccgtctccccctccatcctcccctatcatttcatcttctcctccattctctccccctccatcatcttcctctccatcatctcctccctctatcatttcatctcctccctccatgacctccctctctattatttcccccttcatcatctcccccttcatcatctcccatctccattacctccctctccatcatctctcccctccatcatctcccacctccaccatacctctttgcaggaacctctagtcatccagaaaatcattagcttttcttaaaaatagatttggggtccttggtcaatggaagatgcccagcaggagggttctaataattctatatgagacagacagggattctgtgtccctgaaagtggcctaagtgtttcctccagtatttcaagttccctggctcctcaggtgtgattctccttggggctaatccatacccctcccctggattttattctagctgttagactttatctgaacaggtccctgctttctttgtcgtgttccctgaggcagttttttagtttctactcccaaaatatattcaacactgtcctttatttccctgtagattttaaaacctttaggtaacaatttcaggttcttgggtctttaaacttttatttccttttcctactgtgtcagccgtcttatcttctgtgtgtgctgcttggtgcttttgagtaatgatctctatgatttacgtaaagtcaattggaattacttcaccttacaaggcactctgaagagacattcgggatgaggccagccttgcttgaggtttcttcaagtgatccatataattcagggaggaattacttcaccttcctgttacctagcatctagattattgtggccgggactcctgttaaggtttttacctagtgcagtctctcgtgttttgttgttatccccactggccctctcctcagccactgtccctctgtcaaagagaaagttcaggcctgctggaaatggtacagggcttcaggggaaatgcaattttctctcttatttctctaatttttcttaaaattgcttttattgttttgtcaaatcactgatgctttgaagatgtttcccaaatattttgataatatttagcagaaaagttgatgtgagaaaacaacaacaacaacaacaaaagctattttcaggaacagacaggctatctggcatcattccatacaattctccaactgtgtgaatagtttttgttttacctccctctccaatgaggaaacaggctcagagtgaaacaggaaccagccacagttatagagacctgcatcttcccacccccaagcctctttactaatgtgcttgctaggaaatggtaccagcaagcatcaacaaacatgctggcatccattcttggctcctaaccacttgttgagaaaaggagcaataagtcttggaaaatggctaggactgggacaaaaggtaaaaataaccagggctggagagatggcttggccttgaaaagtgtgtatccatgttgaggaggctcacattagtccataactccagcgccagaggagtctgacactctcttctggacacttagggcactgctctcaatgtgcacatactccacacagagacactcacacttaattgaaaataaaataaatctttttaaaaacatagagtatgcagagaagaaacctgaaagatttcaccatgtgaaagtatgtaatattattctcactaatagcaaaaccaatatcaaaggaagctttcctgtttatatatgttgagtgaaccatgacctacctatgggctgcagatcaaaagaggaccttcttcagtatggtgaagataatacttagcaaaatgttgaattaggtgctgtttacttctgaacttgaaacatagatgtcaatgattcacagatgataaaggatttggcaggaatcaagggacgtttgggaagcccaggcctaataagagggctaatcttctacctctcagaggccataggaaatcaaaaatgagaatcctagtggtcaaacaccaaaaactcattcataaagtgagaagataaataccagctaggactctgtccaagaaattttgacacccctacccccacattcaagcacattgcactagtcttcccaaatgttgttctattttgagttaggacacatctctactggagctaagcccacccaagttcttctcctatgactcttagaatgttttctttgatgcatccacagatgtgccaggcagagcccatgttttgctttgcctcacttgtaagacaaaacagagagacctggcagccttggtcttctgtgcaggaagagatgattcatttccccaccagggtggatgagagcttccgggggtctgccgatggggtgtgacctgggcacttcgctgtgcctgctcctactagaatgccagatgtgggtgctgagaaccaaacccaagtcctctgccacaggagtaaatgctcttaaccagtaaaacatctttccagcactagctatcaccccatccctgtgtcttccccctgtccttgcctgctctttcattaccaaaaaaaaaaaaaaacattgctgtgtggagattaaagttttcctttctctgggagactcaaaatgttcaggacttaaccagacaaggatagcgtgggggggaggggggcggcgggtgtgtgtgacagaaaagggacaagcttgacctgtgggcaggagctggtacatctatggaagctgaggctttggcatccccctttcctgggcagctagttgctcccaaggccaccataggctcacatcacagccacaggcacccattctgttaagctaatgagttactgctgagccagggtaataagaatgtcaggtgtgagcacaggattattttttaaagtctttttgggaggcagatgttctatttcttaacctgtgtgataaatcagtgtgttcattctggcatgatttagcaagctgctgagcttagctctctttgtgcacattatatgccaactaaaaggcatacacatcagagcaggaggctttgggggcttctataaaattctctcattagaatctaacttgaaatttatgctatgatttccttgctcagttctttctgaattaaatgttttgtttggggagaattacacgttcacatgcacctgttaagagtaatgcacggcggtttcacaattctttgcctacttcccctgtttggaaacaccttgcaaagctttaaaatatctcctgcagggcagcgtgcttccattgccacaggaaccctctggcggctcttttgtggtcataccatcttccttcatccctcctctttaatcctaggtcacacgcaccaatccgctcttcatttgcataaccatcttctcagcaatgggttacataacatacccggattcagaatcggcttccccctcccacatcattttctggagatacatctatgctgtttcatgtatcaagagcctgagttataattgccaagtagtatttcacactgtgggtatgcaacagtgtgaataaccagtctagtttttaacagttaaaaccacttaagaaaaaaaaaaaaagttaaaaccacttggttttaaaacgttggtatacaggattttgtgtgtataaaaattctaatttctccaatgttaatgcccaggaactcctgctagatcatcccctcgtgttgatattttaaaggcctggacatccttgcttgctagagcagacatgacatctttacacgtccgcagtcgtgtgatgcaggtgttcttgttttctgagcttgagcgctgcctttggctattttctattttcacaggacagggtgcagataccagtccctgtgtgcaagcctgctcatcaccaaccactgagcatttttacgaggctacttaagtctccacccattatcttttatctatgtcgtctctatgctggcctccctggttgtcctcttcttttagcctggcgttttcctggctctgagtgtgatgagtgtcttttgattgagacctggatgtttgaggctttatgtcacaaagcaatctggatctgtttaagcatctttagctggcttcctcgagcactgtgggggatggtatctcaccttagcaccatgcaatagagataaaaattctgagttccttaccccatctctgatgatagatgttctagttagggtcttaactcaacagtctggagcagtagttctcagccttcctaatggtctgatcctttaatatagtttttcatgttgtagggactcccaaacgtaaaattatgttgttgctatgttataactgtaattttgctactgttatgaattgtattgtaaatatctgtattttcaatagtcttgggtgattggttggtctttgtgaaagagccattcagaccccaaagaagttacaacccacagattaagaactgctggtctagggtaacctgagaaggtggtcttagatgagagatagctcagatcagttccatggggaactgtcttgattgttaattgatgcagaagggctcataccactgtgggtagcaccatttcctgggttgtataagaaagctagctaagcatcagtgagccagcaagccagcaagcaaccgtgtttctccacagttgctacttcaagcttctactttggttcctcccagacctgagagtgtaataataaaccctttcctaccctcagttgctttagtcagaatgtttaaacccagcaacagaaaggaaagtctagggtgtagggcgttcaactgggcctcaccaattcctctggttgggagagacaggaagatggcatcactttccccaagtggtctggtcactttcatgctaatgctaagttctcaccaggccttctctgaccttatgtgggagaggaaaggagctctctactgccaggagataaaaggcgtggctcctcatgagggtcttgctacaacctgttgggaatacaagacttcgctatgtggccagttgagctactgggagtgtggatacagctttctctgtgtagcttggatatactagaacaatcatatggcacaactctgtgtagtgaggctgccattacctgatgctttggcgagagacagcatatgtttgttggagtatttgtcgacatctgttagtatctctacactgaaagaaagaaaatcctaggaaattaccaccatcgctgtattagttggggttccatagagtcacagaactcatgaaatgcctctatatattaaaggaatttgttgtaatgacttccaactaactcaacaatgggcagctgtgagtgagaagtccaagagtctagtagtttctcagtctcatgaggctggttgtttcagttggtcttctgtatgcctcgagatctaaatcaaaagcacatgtcatcccatgttgagatctgggtcaaaagcctgtatcttccaacctcaagatctggatcacaggtgtgccctccatttctggatcgtagttcactccagacatagtcaagttagcaactagaaaaaccatgccagtcacccaggagtcagtccctagagatctgtttctctcttcatcctttcaagtcttctcaggtttgttttactaaagtatctagggtgtcctctgtggttaagggaatagggaatctgtcttctcagaatgagcattgatagtgacttctgcacagaggataggatgggatttacgcaagtgttctggaactgagcctcaagcatgctagagcagcatgctcccatgaagccatggctgtggcccagagtcctttctagagaactttctgaatccctcaggccctagatcagttgactcttggagtcccactttacctgagccatttcttgtcccttggcctcatgctaaagagtcttccttgttgcctgtagcttttgctacctaatctaagctccgggaacagactgccaccagcccctgcccaaagaatattgaatccgaggatgaaaaacagacacacacagttgttcaatttcaacttgccttattggctcaattgcagggcattattaatctctgaggctagcatgccctccccaatactcttagctcagtaccctaaatctgtcttcaactttagttgttcagttacctttaggcccagctcaacaccccatctctcccatctggagaagcagcctatggctgatactcccaagatttcacatggattcacacgttcctctgaaacatggccaaaactctttccttcccttatgtctgctagcctgtctgcagggacctggaagtcccgcctattccttctgtccagcaattggcccatggcatctttactgatggatcaagaaccaattgggaaacagaaccttagcatcagacccacccctacccttgctacactctttgaccttgggacctttttgcctttcatctaatctagagcatccctcccagtcatagctggccctacagaccgatttccaaacagaggagatccctctgcattgcattttccattttaaaaaaaatgttttattggaccagtgagtaggctcagttggtcaaggtacttgccaccaagcctgatgacctgagtttagttcctggggtccacatggtagaagggggaaaacaggctaccaaactaccaaaagttgttctctgacttccacacgtatggtgtggaatgttttaacactctcatacatactacataaatgttaaactatattattatgtcctccctactttctaggagtcaaaatgcaccctttatatatagtgatggtagatgctattttctgttatctttaacaaaaactaaagtttaaagtttgtagtcacatactgcttcccctaaaattgactttgtctttctttttcttctaccttaaacatattaattaaaaattaacatggaaattggggctcattttgcaaacactgaaatatgtaaatttcagtatactttggtgagttttgacagagggcagactatataacacagaatttaatcacgttggagaaagtgtccattgttggagaagtttctgggagccactttcagtccctgccttccctgacccctgcagttccgactgtgtgtgtaactcagttctgcttgtagaacttgagggagcagacagactggctccttctgtgcagtgtatgtctgtgatgtgttatcctctgtatcctccccctacacacacacacacacacacacacacacacacacacacacacacacacacacgtatttctttatgtagacttctctggcctctccctgtctctactccctccccagggctctttgctctaaaactctgctgtgtcatggcctccagcaactggccttcacctccaggtgacctcaggcacagccactgatacagagtcccattgtctcagagaggcagccgccatggatgctaataggcatgctatctcaccacgttaatattcatctctctgacatctgatcatgttgataaccctttcaagtacttactactcattgacatgtcttaatatttttgtgaaatatatgattttttcctctgtcctattaaaatctgcataatgctatgtggtaggaatttgctagacactatcaatacaagaagttttaattttcccatcctgtggccaaatcattttcttaatatcttttgaaaagcatcaggctttaaagtttggtgggctataagtcatcggtttttaattttttactcgcgcccttgtggcttttctaaaacctttttgcctaactgaaggctgtaaagataggcccttaagctttcctagaaagcaaatggcatttgcttttacaacgatgtctgcttcctatctctaatttctgagcataggatgaggttgaggtagaagtgggataactgtcataaaattagccaagtatctaatcatgacatgttaataaacttgccttttcccattcaagtattttgccttctctggggagaatcgactgaacataagattaggaggctgcaggggatttaactcatatttaactccattcattgacttgtctattatttttattaattttatcttgactgttataatcaatcttatattggataatacaaatctcctatgtattgtatctatccttttggctatcctatttttttaaatttctctatacattttagacttgcctgtatatttccagcctgcatttatattgactctcctctccatttggaaagagttgatgctattgcagtctgttgaacgtgaacatggcacgtcactccatccggtcatttctctccagcagatctttttaattagcaatagaattcttgagcatacctgacgacattaagccttaatttgcatgttcttaaagctattaaatggcacattttaattgtacaaattccagttatatgttccagatgtattgtagacacacttattcttgtacattggcttgtacacctaagtctactaagtccatctcctactggattgtagcgtatggatttatcattattaccaagaaggtatgtgtcctggacttttgagtttcatggacacaaatgctttaaatagcatcttgtaagggctcctagttctagttaggatgggaaaggcacatagagaactttgctccccgtgtgaagaagataaggaatctggaccaagcaaaactgtacgaggaagaggagctgtgctcaaaatgatgaagtcgagaaatgaggtccttggggataaaccaaagcccctgatgcttcaaacacggggtgagcagctgtctagaatgcagacggacagaaatgtgggcttactgatgtgagagactctacaggaagagccaaaacatgagaaccaggaaacctggagcgcaataacagcgctgctcccgcacgtccacggtgtggaatattagactggtggggtggggagcgcagaggtgacctgaaggggcagcaaatctcactgcatcccagctaaaggatttaagcacacacagtttcctgtctgtaagaagggacctcaggctcagaagcactccctggagacaccgaagggatggctgtgtttagtgctgtatttcatgcatttgtgaggtttctgcccttgaagaaatttttgtaattgaaaatcgctccctctcagttatgtgcttatcagactaaaccatcagttgattcagataccatattcttcggtattaaaggtgtgaaagtgccgtgctgcagttctgtgacaaccacctaattgagtattctttctcgttatgtgtaaatgcctttgtctgttagaaatgctaccaaacgcagccctgtggttactttaattccattgctgatcctttcatatggtttcctgtattctaaagggaaagccatacgcacttgacttctgtagaaacttttcctcttatgaatcagcagcagtttgaatcaatgtcagacgcttttattaagtggttaaattgatgcctctgtgtcagcactcttgttttaggtaatggtgatttagcattctcactaaaggaaatgccagcgcataaagaaattatatttattgctaactagagaatctgtgataataatcatggaagggccaggcaaacatgagatcctgggttcaagcctgtggattacaaatcaccaccaccaccaccatcatcaccaccaccagcagcagtaacaccaccatttttttcatttgtgtgtgtgtatatatatatatatgtgtgtgtgtatatacatatatatatatgagtgtgtttatatttttaggagcacatatgtgtgtgctcactcatgtgcatggacatgcatgtagaggccagagattgatatcaaggattatctttttttttaatttgtttgctttttcattttgttttgttttagagatagggtttctctgcatagccctggctgtcctggaacttgctctgtagaccaaactggcctcgaactcacagagctcccctgtccctgctgccaaatgctgggatcaaaggcgtgcaccaccatgacctagcctaatattttttaatccaataaagttggcattcagaattagtcaaaatacaaatcttccagggagacaaatgggtagggactgagtcagaacaaggcctctgggtgtttagtaagaagactagttgtatgtcacatcagggacaaagatattaaccaggaataatacagaagccagacatggtgctgcacacatttcatcctagcacttaagaggcagagatgggcagatatttgttagtttgagaatagcctggtctatctagtaagtcccaggctagccagggttacatagtgtaacccggtatcaaaaagaaaacaaaaataatatagaaacttcattccactaatagcttgaattgtgtccctatcacatctctggattaaaccacattttctcatttacttgaaaataccctttcctttgtatgtctgtgcctggatgtaagtgtggaccgtgtgggagccagtgtccatataaatgttttcctcagtagctctccatccctctcccttcttccttctctctccctcctccctgcacacacacacacacacacacacacgcacacgcacacgcacacgcacacacacacacacacaccccacacacactctctggccagcaagtcccaggaacctcctcctccactccccagagctggctggcatgtcagctgcagacttacctgtttagctgatgccgcccatttgctagcatcggtacaggtcctctcgtgtgtggcacgcacttcagcaactgaaccatctctccagcctggaagactcccttgctttttaaaatgatttattttctttttcatttatgtgtgtgtatgtctctgtatccgtgtatatacgcacacatggatcctatgaatttgaagttacaggcagttgtgaccacatgtgggtgctgagaactgaaaccaggtcctctgcaagagcagcaagcacttttaactgctgagccatccccagccctgcttcctcttctgttttttgtttgtgtgtttgtttgtttttggttttgttttgttttgttttctcaatatctaggttcatcagaaccaatcaagatggctgaaaataatgggcaggaaattactgttggaaataccaaacagtcctctagagatggatgtcgactccatcgggttcctttcaaaaaatggggtacaattgacatagcaaacttatttgctttacatttctgggcagaaaccattaatagtaattaattccacttctgtgaggctgaagttctttgggtaatcttatgtgtgatcattcctggggttgcagtcaagtgggcacaacagtactgggctgtggggaggcgaggtgacccctgctgcatcagcagtgggggctgcctgttggcctaggctccttagcatttcttcctcaggttcccatcccccagcaggtgatgctggacagctagcggtatcagcagcacaggagaacaagagcagggtcctcagagcctcttcaaggcctagcctgtgcaattcactttcaccttctacttgctaaatgagccatgtgggacagatataaagagcatagcacagtgtccaagcagggaaggagccgctcatttgactagctattcatctctccatgtgtttcagcttgggtttcccccaaaaacatctggagctggaaacagaggcaagacacacagaagcaggcaaaccttgcacagagagcaggtagtggtcaggaaacacaccctgcaaattcctacatggccagggccttgctgaatggaagtaagaaagggggtgggaagcttagagactgctgcctccaggctacctccttttcctggctggataaggcagtactggaagagtcaaacaggagagaagaaagaaaatatgcaagcaggtgggcatatggaatcaaaggagacaggaacccttcccctgggttacagtcacatatccacactcggggcctcctggtgccccatgcttctgcttgctttctggcttgtatttgttatcttatacatctctgtgtgtgtctgctaggctgtatgtgcaccatatacatactacacacagacacacacacacacctgcagaggccagaagagggtgatagatccctcggaaaaggtgttacaggtagttgtgaaccacctgacctgggtgctgggaacaaacttgggttctctgaaggagcaagggctggtaaccactgagtcatctatccagtccacattcaagcttttttttttttaatgcagattgtatttttaagatttatttttgcttacatgtatgtatgttcactatatatgtccctggtgcccagggtgaggatgagggggctgaagagggaactccatcccctggaactggaggtagggacagctgtcagccaccatgtgggtgtcagtgactgatcccaggtcctctacaagagtagcaagtgtgcttaaccattgagccatatctccaggtccctacccaaaccgcctttttttttttttttagaggccctgaaactttgcagtagcttcctgctgtaagaggccatgactgtctgcagtgtgtagtgtgcacgtaagcttttcaagtcctgtgtggtctctgatgcaggacagtaccacagttcgaatactgggagtaaaaggaggttaaagattatgctcctgataggaaaagacgaatgggcatgctgcgtggaagccctgccccgccccacctcacccctccagctacatattctgagttctgttgatataaggatgggaaagccagagggtgcttcaggctattccagagcctgaggtttagaaactatcctggcagtcaacgtttggtttccctagccagttcaatgctcttttctgacacccgtggtggggtctcactcctggagaatgaggagcacagaaataccattcttcatcagcatttggtctttcctttttttttttaactctttcttatagcaaatagaaatcactttccataatttctacctctaagtctatatttcacactagacaaaccaaacacattgtgttctttcacaagccttctttcaaagtgagtttcccccattggccgctgcatgacaagagttggcctatctgccttaatgaaacccacagggagcattatcttgaataattacatgagtacacgtggcaagttcaggggctgggtagaccatcttgtggttttgaaatgtgtggtaaaaagcatcaagagttgacagattagttggggatttgtcaagagtattaattacagacttggaaatcttggttagtgacagtctgtcttgtcgcatcttgcaaatgtgatcaaagtcatttcggaacttatttgatggtgcctaaccaaggtgtgtgaagaacgaagcttttcattagaaatcactgggaagtggggtgcattttgaaggaagagggccttgaattgcactccccttcacacttcttcctcctcttcctctttcttttggggagggcagatgggggggtcttaaaatatagatagcacacaaggataaagttgggcccataaaagtgtttttaaagctacaaaaagaaactatgaagcctggaggttgttgtgatcagtcagtccaagacatgtatagcttaacgaagacctcaaatgtcagagtacagtatgaatttgcttaggggaagggaaaacaggtctctccccttgttcagatctagaaaaatcatcctttattttggcttcttgcagggatgagtgggcgggtcggtactggcatctaaatcatagaaaatgaaatagaaacacagccctgtcctgaaacctccctcccttcttctgggaagtctgtcctgatggacctccactgcctagcagagtggatggaccactcgttgattctgcgcaactggagaggccggaaagtgattaacgccgagccttggtttgtttggtggtccgcagcagtctctgaaaccctccttactgccttccagactctgttggcacccttctggtgagacgaggcagatcttttcaatggctcatctagtcagaagttctcgtcagttgcctctgtgcaccagagggtggcactccagaggtggagaggaagggcgggaagaaggaaggaatgaagagaaggcagcattaattctcagagctaggtctctagttaccgaagtatcttagcaaagagccgctaccctcagtcccttaccgggggttgggggggaaaaacccctctaagtttcgaccggacctgggggtcagagtcttagagattttaaagaagtcacagcttgtttagaaacaataactttctgtgttgtggggaacccacattttctgcacttctgaggggcagacgacaagtcctccttgactgcgcccacatctgacctgaccctctgtgccatgttttgcagttgctgaatttgtgcgagtccgtgaaggatgacgccctgaaggtgatctctgccttcaacattccacacatcaccatccgtgcaccaaaaacaggaatccccaaccccggggctgccgaggccgcctacccggcacccatgcagccgctcgtgcgggatgcggcgcgcgctcaactggccaagctgtgagccaggcgagaaatttagtgtcccatcttccaagtatttggccagagctggagcagaggccaaagtggcaggtgcagggcagccaccttggggattttggtctggcagaggaggtccagctaaggctggcgaggagcagggcaagttgtccgggagagggagccatagatggataccccactatcacagtgacttagcctggtttgtagcctcgcctggcctttaccttgacttctcccagccatggccctggatccccagacaatcgtcttcgcccaccgcatggtgccaccaaagatctctactgtcagtggtgactcatattcccagagacttcgaaaaactctggcgctgggtttaaaaaaaaaatcaaaacataaaaatcaaacacccttaggcaaagggggtggaggaaagctccaccctctccaagctcgggcaaaagttcagcgagggatgattcgtgaatcaggcttgctccagctttgcgaggaaatgcactggcgagagcggagagcttgagcctgcagtcgccctagtctcaccaggtaggtgatctccggaccgcacgaccatgcgcgacaaacgctcctccgcgctaaactgttaccaacccttcagaaaagcatagatgtgcaaagattaataaataatagaaagatgctcccgcggcttggagaggtagggctggctggcctggggaataattggaataaagtgattttggaatttggagagattac

SEQ ID NO: 454 - DNA, 3071 bp, Mus Musculus
atggagcagacttccaatttggggcttggggactcatcgctgttccgctacctggatggagaactctggagccttaagaacgagcttcgcagagccctggagagctctcctctcttccagcccaggtatgatttaagtttggaggaaatgagagctttgacgaatcagcgagtgaagtttgtcttgagtctccctgtggtaaagcatgtactcctggatcagcctctttgggcttgggccctctggcttctgtttgtcctggaaccctggcttttcctagcaggctgtgacaggctaccctggatcttggtctgtgtgctgcttttggcaggagtctttgtcccagctccagccccatgcacttggatgctggccacttggccaggccagccctggccccatgggatcctgtggaagagttgagcagagatgacaggatggagtggactgtttatagaagtccctctgtatagattggcatccaaagtgtgctgtcatctgcggggaccacagggatttcttcagagagcctgccagggagtgtgttgtctgccaagggactccagagcagctggaatcatggaagaaaaaaggaagagcttcatcagccaaatccttatcctgggagaagtgctctgcatggtggatgtgtccatgtctataaagtgtggaatcctttttttgttatttggtggtgcaatcagcaatcttggaagtcctgaacacgttaccaagtggttttggccactcaaggagcagaagtatactgggatgtttgcaatgactgagaggggccatgggagcaacgtgagagggatccagactgaggccacctttgacctcgacaatcaggagtttgtgattgacatgccgtgtgagaacgcccacaagatgtacatcggcaatgccatgcatgggaactacgctgctgtcttcgcccaactcatcattgagggaaagtctcaagggccccactgttttattgtccctatcagggatgaaaatggaaacttgtacccaggagtgacagctattgacatgatgcacaaagagggtatgaatggtgtggataacggaattttgatatttgacaaggttcggattcccagagagaacctgctggataagtttggttctgtgactccagatggacaataccattcacctattcaaagcaagaacgcaagattcaatgcgatcctggcaacactgactccttcaagactagcagtgactttccaagctttgggcgccatgaagcttggactgatgatagccatccgctacagccacagccgaaggcaatttgggcccaaggacaaggaagaagtgaagatcattgagcaccaaatgcaggcactcaggctgatgtctcacctggccacagccctggccgtgaccttcacaagcaggcatgcagacgacatcctggatgaagacatcttccagggaagggcgctcaccaacagtcgctcgctacaggcactgatggctggactgaaagcctacagtacatgggagactgttagctgcctacaggactgtcgtgaatgcaccggaggcatgggttacatgatggaaaccagaatctcagacctgaaatgtgacacagatgtgtttgtaacctttgaaggtgacaatgtggtcatgcttcaggttgtggcccgggaactgctggcccagtacagcaagcagcataagaaaaacctgctcttgggtgtgatccagaactggacagcaactgccggggacaagctgagaaccagtttcctggcgtttaacactgacacggtaggatgtcttgcctttctgctgaaagcagtgaattttcgagaaagggttcttcagcggagtttggtgtccagaatttactataaggtggtgaccaagaagggggacttcttcagtgcctggaactcctgtatgcaccatgtcacctcattgtctctggcacacattcacagagttgcactagagcagttcacgacggcagtgaggcaatgtcccaacagggaggaccaggctttgctaatgaagttttgtctgctgtatggaacgaagctggtgttccaggagcgaggctggtacttagaacataaatacctgacccccaaggccagcatgctgatcagggctcagttgctgaatttgtgcgagtccgtgaaggatgacgccctgaaggtgatctctgccttcaacattccacacatcaccatccgtgcaccaaaaacaggaatccccaaccccggggctgccgaggccgcctacccggcacccatgcagccgctcgtgcgggatgcggcgcgcgctcaactggccaagctgtgagccaggcgagaaatttagtgtcccatcttccaagtatttggccagagctggagcagaggccaaagtggcaggtgcagggcagccaccttggggattttggtctggcagaggaggtccagctaaggctggcgaggagcagggcaagttgtccgggagagggagccatagatggataccccactatcacagtgacttagcctggtttgtagcctcgcctggcctttaccttgacttctcccagccatggccctggatccccagacaatcgtcttcgcccaccgcatggtgccaccaaagatctctactgtcagtggtgactcatattcccagagacttcgaaaaactctggcgctgggtttaaaaaaaaaatcaaaacataaaaatcaaacacccttaggcaaagggggtggaggaaagctccaccctctccaagctcgggcaaaagttcagcgagggatgattcgtgaatcaggcttgctccagctttgcgaggaaatgcactggcgagagcggagagcttgagcctgcagtcgccctagtctcaccaggtaggtgatctccggaccgcacgaccatgcgcgacaaacgctcctccgcgctaaactgttaccaacccttcagaaaagcatagatgtgcaaagattaataaataatagaaagatgctcccgcggcttggagaggtagggctggctggcctggggaataattggaataaagtgattttggaatttggagagattac

SEQ ID NO: 455 - protein, 632 aa, Mus Musculus
MTGWSGLFIEVPLYRLASKVCCHLRGPQGFLQRACQGVCCLPRDSRAAGIMEEKRKSFISQILILGEVLCMVDVSMSIKCGILFLLFGGAISNLGSPEHVTKWFWPLKEQKYTGMFAMTERGHGSNVRGIQTEATFDLDNQEFVIDMPCENAHKMYIGNAMHGNYAAVFAQLIIEGKSQGPHCFIVPIRDENGNLYPGVTAIDMMHKEGMNGVDNGILIFDKVRIPRENLLDKFGSVTPDGQYHSPIQSKNARFNAILATLTPSRLAVTFQALGAMKLGLMIAIRYSHSRRQFGPKDKEEVKIIEHQMQALRLMSHLATALAVTFTSRHADDILDEDIFQGRALTNSRSLQALMAGLKAYSTWETVSCLQDCRECTGGMGYMMETRISDLKCDTDVFVTFEGDNVVMLQVVARELLAQYSKQHKKNLLLGVIQNWTATAGDKLRTSFLAFNTDTVGCLAFLLKAVNFRERVLQRSLVSRIYYKVVTKKGDFFSAWNSCMHHVTSLSLAHIHRVALEQFTTAVRQCPNREDQALLMKFCLLYGTKLVFQERGWYLEHKYLTPKASMLIRAQLLNLCESVKDDALKVISAFNIPHITIRAPKTGIPNPGAAEAAYPAPMQPLVRDAARAQLAKL

SEQ ID NO: 456 - DNA, 685315 bp, Mus Musculus
  misc_feature (1)...(685315): n = A,T,C or G
gtgcacagaggatgtgctgaatggtgcgcttccaggcggcggccgagcaggatccagcggcgggcgactcgcactgcccggctctgctcctccgcgtctcccgaggctctacagtcaccgcgggctccagatcctgcgtcccgcccggggcatggcaggctgctgtaccctcgcgtgtcgtcccgcttactaagcggcgcgggccagaggtgcggaggccaagaggccggaggccggcgggcagcgaagcccagagcctggtgaatcgagagccaagcccgctcgcgcccggagctccgcgtcccgtctccactgcgctcgcccgggccgcccggagccccgatgagcccagatggctggggctcagcccggagtgcacgccttgcaactcaagcccgtgtgcgtgtccgacagcctcaagaagggcaccaaattcgtcaagtgggatgatgtaagtgaggggcggcgcagtggggtgcggaccgggcaccctagggcgggctgcgtgggggtggggcgaggggcgcgttatgcaatggggcgctggagcgggagcgggcagcctagggcgcacaggttgccagatgcctgggtgggtggtagagggtggcagctttccgcgcgctctcctcctcctagggggtttagagttgacatctttgctgggtctggccagcacctcctgagggacttaagtctttggggccagtggaaccgaagggacatgttttacccagtgacaggtcctgagagtttgaaaagagcatgaagttagaagcagctggatagcgctggagagtactagatgcatcccccaccacctcagctagctaaggcatcctattacctcctttgccctctttcaagaagtactagctactatccaggtcccaaaccttgcagttactgctaacccttgagcatttttttaaaatgctggccaagcagcagaggacacagcagtacagccgacaggtggtcgttgatgccaaactttagcgcctgactgcagagtgaggggccttagaaagggctgttggtgcacaccagaaacggattggtgagcaaactagtagctgttggggccgaggagcgcaggatggacttagagacagggccaggttttgaaaaacaagcttgcttaggtcttcactttgaaatagacccacaacttcaccctccggtttacttgcacccgttgctgtataggagagatcctggccggctccaggacttcctatgacctctcccttccctccaccctagttaccttcagaacacttgaaggcttctgacagaaacctccaatggaatgcacattaccctatcgatgtggcttcctgggtgtcatccaatgggtttgataagaaccactcacccgaataaacctgagctgtcaggatctaaagagattccagtcctaatgattaacacatctcctatcaggagcaactgtaggagaatgaacccgtcttctaactgaaatgatttcccacctccgtaaattacagcctgttatccttccgggtattttactttaatcttcttaagccaatttccagtgtctgaaaacaatttaaatattccaggtagtgaatccaattacttagatgagtgcatccgtgtctatattttgtccagttggaagcgcaaactgaacttgcagtatgagcagagccacagcctccttgaaatctcttgccaattaccaaatgatggaggcaaggatgtaaacacaccctctttaccaagggctttgcacttgtctcctttctgtcccagtctaattggaccggaggctgttataaatggaatagaatcgaaacaataaatcagacacagatgaattgtttttgttaagaagacaaaaggagagtgcagttcaacaaatgcaatgttctcatccatagacatccttaggtaaaaagcaaacaaaggggtggatctgagaaagaggaaaagggtaaagtggagagaaagagagagaacaggaggggagaggctgagaggnnnnnnnnnnnnnnnnnnnnggcaggggtggggaggggaggagaggagaggggaggggaggggaggagaagcagagcagaatcccagagtaaaaaaggggtagttttagtcataagctctggaattcttattactaatggtctttaaactatattttattaattctccataaagtctggtttttgagaacataactttgagagcgaaggttatagatacccaggtaggtgatttgtgttatatgtatttaagtagcaaatgttccacactcacttcatcagtgcctgccttgaactacattttgagggtgatggagaaagtgggtaaaatctctcccattatagactggatatgctaaatagaagagatccaaaatcatcaaaacaccatgatcaaatgatgctctgggaatgatggagaagccaatagccagccctaggagaagggaaaagtgggcagagtcctccaattaaggcagcagtgagttcctggggaggcttgtgctaaggaggcccattgtgagggagcccagagatcttcttaagagaaaccagactgcacccagagaaggaattaaatggactttagagaagtgccctgcaggcacttggctctcttgctgtgtttgatccgtgcgctaggaggcatggagacattcttagtatccctattgtagtccctgagcatccccttttctggtactcctagagtttgagtttcctcttttagcaacaagccagtttgatctgtttggctgtttctattgcatctctatgaagcttcactttccagacaaagaaaaccaaatctagaaccagaggtctggcttttctcactcagcagtgtgactttagacaaataaacatgttgaacctttgttgtctcttgtacagaactggcaatactatatcccctatacatttaatgtaatggtctgtgggatttctctataatcaagcaaccttcccttcccttctcccctcagaagcatccagaagttctgttagtcttgggattgctggatctaccctgtttctgattcagctttggggtagggcttgagggtgtacctttcttacaaggccttagttagtgtggctgtggtatccgctgctctgggaaacagcactgtgtaggaccagggagaaggtttttgaatgagctgttactgcagcttcttagttcacaaaaatgtccagtggcttgtgaatttaattttgtctctgcttacagtttgaggcatttgtcatctaggaattggaaacaccccagtggcagctttgttagatcttctggggttatttactgaagcatcaatactcagaattgaatggataactcacattcttacatttcttttgagttgttgttagacaatgaataaatcgttcttataccttcttccttacttactcttttccttccttcttttccctccctccctccctcccttcctgttctccaggtttgaaagggtctctgatttgattttgtgtaacagagctatggatgtttctcttctttaagtttttggggaatactctctctttctaccccaagggaacatcccatctgtactggctagttttgtgtcaacttgacacagctggagttatcacagagaaaggagcttcagttgaggaaatgcctccatgagatccaactgtaaggcattttctcaattagtgatcaagggggaaaggccccctgtgggtgggacaatctctgggctggtagttttggttccttatctagaagaaaaataaatgctacaaacaacttggaagtcctttgtacacctgcttggctgtgaaaacagcagaatcctgctttctagtttataaggagggagtgtgggcaaatcccatagatattttactatcatattagacatcacagtgcatactgagaatttaaaagtgatatgttggggttgtttaggattgtaaagtgctacacaacataatcactggtcctgctttaccagccaccatatggaatgggagatgtcacatagacagggctatgtcaggcataacttgttggctctttaccatagtcttggaaaggttgttcctggatggtctagggatggttggcactgacagaggcacaaaccaatgacagcaggtaccaaatggccaagagcaggagcagtcccagacattgcagcacccactcagacactccctgctgtgtcaaggaagatctgggagcccttagaagtcaggagaaggtttggaatgttgcagtaatttaaaactagtaatttgggacataatgtaacatcgaagctaatcctgtcttgttggactcagtgaaaggagaaagagctgacctattgtagctgcctctttattagtaacaagaaaaaaaaatcaaattatagccttttagtttgtatttgcacatggcccaattaaaggtggaacatggtcaattctttgtactgtgggtgttccaggggagctgtggtgaggtagacagtggatggtaatttactttcttcatcttatctagagagccttttctctcttgagttttgacttctgtctggattggtgtttagaggtcaaacttttactgggatatctacttatcccagatagggagccatgacagagcaagttcagataactctaaagtccaacatggtgaacagtaatttttattaatgttacttatcggaaagtaggtgaagggttacttgcagaagcagaaattactccaagcctaccacagcataggtgacaactcacaaaagctgggaacctggagcacactgtacagcctgcagtcagctcaacaggttggagagagttctttccaaggtgcttagccctcttctaggcagcttggttggtttcttgttctttcagggagctggtcttgtctgtgaattttctttgcagcttggcttggctcagagtgagtcttggtagtctttattgtttactctagggagtaagtggcctggtgaatttggtcagttttagggacttcctgaactattttagttgtttatcttttggtttaagaaacagtccctccagaatagaatgtttcaatctcagaggaaactgctactcagcaattgaacaggagataggtaaggaatgacccaaagctgtgtaatatcccctgccttagccccagcctctggcctgccaatgtttcaaaccttggaccttatttttatttttaatcttccaacctccaaggagtagtctccttttctcccccatctccttcttttctccctctctcccttcctccatctccccacctctctttcattttttaaacatttttcctccctctcccctcctcctccttctttttctcctccttttatagaatttccttgtataacagccctgactgtcctgggactctccttgtagaccaggctggtatcagtctcagagagattagcctgcttctacctcctgagtacctggattaaaggcatataccacaaacccagcttcgggtctagtctggtccggtccggtctggtcttttcttctgtttatcactcttggttcccaaattcctatcatactgcaggcaaattgcctagtctatctcagcctcatgtttcttaactgtactatggctattgaatttcttacatcacagaagagctgctgggagtcatatgcatctcctcatatcatttctgacacacaggaaaccccaataagaggcaggtttgaaaaaacaagcaaatgatagaaatagaaatagacacgaatacatggattttaggaaggtagtctggacaagtaagatactactcttattctatggagtacagtctgtaatttcagacttttattgcattccatttaatatgagtttcaaagttatagtttataatttaaagaggaagaacatctatttttaccctttgtaaaattttcaaatgttcctaagaaaatgattctacttaattcaaagcaggatctactctctacaagcaagccagtaatgttttctataatggcgacaagatcatactgagaggattagtgaagggagcagagaggagggtgtcagaagtgggaagtcagcagatttcctttggagagaatttggggagtagaaggaacagaggtggaattttgactgaaggcatcatcattctctacagagtaaatggggatgcaccgttagttaagattccaagctgttatggcggacgacctgggtttagtttccagcatccaagattgttgttaacaactgtttataagtcagttccaggggctctgacaccctcttctgacctccacaaatatgtgcatgatgcaaatatgtacacccaggcacatgcacaagcatgtaaactgaataaaaaaaaatacctgcatatgtcatttcttgtctgtccaaagaactctgattttctgttgataattagtaatgagtatgatgtaaatgaacacaagactatagttttctctatggaagatgtaaaggtgagctaaggtttacatcacagtggaacatcaatgtaagaaaaaagtgaatacgagtcatgtgtcctggtacatcagtgttcatggagtagtcagtcacttgtcaacaacacattctctagggacatcattactgtccagcttgaaaagatccagagtccattgttaacaccattccctaccctctgggtagctttttatgactggtaactccacggacggttatgcctgtttttaatctacggcagctatttttattttgaacggaaactaaacgaaaccacttcagcctacagccttttgtattattgctgaaactgaccctctcttcagcagtaacaacaaaagtgattgatccttagcgtagatgacccctgattaggtccttatctctcctcgggctgactgtggaaagtggcgtaggagtggagagtgccccacaggaacaaacacagctctaggatttcaacaggtgagagtaatacacacaggcagttacctgcacagcacagcaggctcatagaatgcaggtgtcgggatctgtttttttattcccattttcctccctcccttcatttctgtttctgtgcttgaggctaagcccggggtctctgtactaaccaggtgctgtatcagttggctgttccccaaccttcgttttgtttttaatttagtatttttttattatgacatgtaaacatcgaggaagaagtctcctaatataaaataatcattttaaagagaatagttcggctccaacctgtgtcccaaaggaattggaatagctgcagcccattttctcttcatagcacccgatgcagacattgtctgctcccagttcactagcttaatttgtactggcaattagaatatcttggatatttcccttgaatttaacccatcagtaaatagcttcaaactgtacttgcctgtggtggtatgtaaatggacgagtttgctctcttatggccaacctggcaacctgaagttaagaaactctttttcaaaagtgttccctgtaactgtgagtggttggctgcagcagaaatggaatgagaccggttggtggttgttgacggatgctttgggtctctgtttaaatacaaatccttgctagctgagcatattagatttcctgttccctgagctaacattaggttcctgcagacgttcaggccctatcacaaattccatatgcactgcatatttacagcatttaagtcgctaatcagagccggatggtgtatgtctctgaagcaaaggtcctagagacacattgttgagagatgatttactaattggatcctaaggaagcatttaattcttgtggaaaaaaatgagttgaaataggatgtgaagaatggctggctttttaataagagtttttcccagtcatctctgatcccttcgaaggtctaatattccattttttcttttcatatgttattttgaaaatttttaattgacattcttgaaaactgttttggtttatgtactaatagatgttgaaaaaatatattaccaagaatctaaattaatatagaataggaaatagactattatataaaatgagaacactaggtagttagtatttaaaaagaattaaaaacatcctacatctgctctccatttccagggcttttttagttcttagtgttttgtttcattttattgtgttgaagttttatgagcaagtccaggggaaaagggattagtgagcaaaggaaacattgtcacctggactggacatggcatgtgtcaccagacactactggggcctgcaagattcaaagagacgattttggtattaaaaaaaaaatcattattgttttgttagacttacctacaaaatgagtgtcagaaagttaattttgattcctgtgataggagaggctatatgaaccttaaaaggagcactaggtcaacagagccagtcagcaaggagtctagctgattgtctagctgatcgaagaaaagttattgaaataaaccatgcatttgtgatatttgagtgtgcttgagtctttgcacccatcttcatacactcttggtatgacatcacgtgacaggatgtctgggcacctaaagtctatgtgccaaaatgctttggggctgaggttctggctgcatattaaattgatggatatgactgaaacttggaggacaaatatgtggaagaggccaactgcctaccctgtgttttgtctgcacttctgtgagccactgacagggtggcacagtgggtaagggtttgtcatgcttagaggccagtcttcttaccagtcaagcttttcttttgtctttggtgtatgttggatctctgttggctttcttgagtctgaaggtgctggcttcattcatggagactcatctgcaagttgcttctttggcctttccagtggtgctgtcaagtgtttacttatccgtccacatcagtttttgttcacaatcccagagaggtttctttcccaccaaaacctgcctggcaaagtcctgctatctttggctcaagttcaggcttgcattgaactcacaaggtagcagatactagacttaggttccttctccctctcaagtgctgggctcccaggcacctgccacccagtctcgctagtaaaatgaatggaaccacaggtttttgcttttttaaaatagatgctcattcatataaccagtgaaaaccacctttcaagaaattcctaaatgtgggaaattacagggaaataaaagattgatttatctgaaaacattcttctgtgagaatgattcacagagaggaagttatattatctttattgttaaaatgaaaatgtagcaaatacaggcctactgatctaaatttctatttaaaatcaaatttctatttccaacagttattctgcacagaagcagcaaaatcattggtcaactaagtttccccccactcctccccttcactgtgtatcagctccctggttcccctaagctcctgccccaaagccactcccgccttctccatttaacaaccttgatctttccctaagcatctcagagttgagggttcattattatcctcgcctcacccgtctttggacaataccattttctcttctatggaatctcttctaagaacataccaatccgtatgcttgcattagtcagcgttccattacaaaaccaaacgtctgggataatcgacttgccgggagaagtttatttcccctcttagttttagaggtttcagtgttaatagctcagtcctgttcctttggacaagggaacttgtgtcatagcaggagaatgtgtcagagtacaaccagatcttctcattgccaggaagggagagagagacagggtcctatagtcctggacacctcccaataagtctctcttttctgaagaccccatcagctcccagtaacctcaccctgcggatggaaattttcaaacatgggtttttaggtgatattcgctatggaaacagtagcaaaacctttaatatctagagtctgagcagtaagaaaacgttacactgtttctagctctctttcctcttttacagtctctgccctcccctgtctttctccccctcatttccccagatctaatgtttgctctgcagcagtttgcccttgaacttctggtcttcttccctctaactcccgagccgggattagagttatgaagcatcctactcatggaggttgtgctaggcaagctgggtaagcctctgcttactgagtcactcccctgccctggggaggtaacctctactatcatttttcctctcaccttcatcctccttctcagcccacaaaagccttgtttcgccctcaccattggtttgaaaatgttaatcactgctttgatcttccttcctttctttctttcttccttccttcctttctttctttctttctttctttctttctttctttctttctttctttctttctttccttctttccttccttccttccttccttccttccttccttccttccttccttccttctcattttcttttcttttgttttggctacggcttatgacaaatgtaggtcccaactccaaatgatgtttggaatctatctagtgtcttttcttacagtgccctttttcacattcactcatacagttaatatccacactttgcaatatgttgatacatcttaaaagataatcaaccagtattacaaagttgtgatgataaatgcctttgttcttgttcttatggagtttatatgcgagtcggggcaatagctattagtcaaataaagctatcattttactctaattgtattgttacagaaaaaaagtacacatatttataattagtatggggagaatttatttttgataaattctattaatgagaagatctggatgctatgtaggacttaatgacaggacaggatgcgtttcagccgtgaaagaggatgtggcgatattacaaggagtcaaggagcataggactttgaaggacagagcaggataagccagcagggagtgtggctcagataatgctgtgtggtagcaagagcctgcctgtgcagtgcctttgtctgagaagtttttacacataaagtcaacaggacgctaataaacccatggttctcactgtgtgtattactgtcatttggggccagggaatattttgctgcaaggttctggcttgcttgtattgtaagatgcctagtcgtttatctggcttttacccaatacatgccaaaattgtgatgctcaaaactgtttgtagatattgcctgcaggcccctgagttgcaaaactgcccccctcctgttgagactcactgactaaaataacatgctctgctcttatctgatttaaagtgtatcagggccctctcttgcctctttctccccccatgtcccttcccaccacagcaagcatgctagtgagtacataacaagatactcagcatcactagtcatgaaccatggtaaattcaactcaagttggatggtttcttgatatccagggctgcattgaaatgctcagtttttccatctgatacacatgctacataatgggcatctaggttggtcaccaggggtccaggcttttggttttactcagtgttggacacatactgcatgccacttacagaatcatgcttctgtttttcctgcatgttctgttgaaagaatttttgtacctcttggttaaaagtaagttcttaattggactttctctgctgcttctcttttctattccaaagcttcttggttctctgatttcctttatttagagaaatttcagtcagcccgcagcccaggaggaaaaccctcatccagtgatgatatgcatggaaattctgcttcacagatgagattgagcattctgatttatcatttgctatggttttatgtcacatgtcccctacaagcttgtgtgtatgaccacttggtccccaactggtggtgctgactggagaacttgtaaaaccttagggaagggtcctcactgggggaagcagaccattgtgggatgttcctggaggtttgtagacccgctctacttccaactgctgtgtctctctggttgctggttctctgagatgtaagcatgtgggtaccaccatctctgatcatcacagagctgctaactccatgctttcccattgtgaaaaattgtcttacttcaagctatgagcccagataagcctctttccttatgttgcttcttattggataattagtcatggcaaggagaaaagcaataggttgaatttattatgcttttatctcatactcagagttgtattgattatgtttcatattctgtctcagaattctcctttttcaccccagtgtacattatcagcatattttctccaccacttcctaatataaatctcgggcaaccctgtggaccatcacagtctcctttttcctgtgttgatattaaagtattggtttatttagaagtgcttgtgtctagtcacatgtgttctcttggagtagcatgaaattatgaaagtcaccatgaagtcagaattgtagtcagccttgaccaacacaccttacacatgtgctaaggaaggagttgtggaatctgaggactggtgcttgaggctactcaggaggctaacggtaactttcatatcaattgatatgggctttcagtacaaagtagcacagattttcaatagaaactctcctcttggttcttgagactaaaaatgtatagttttagaaagcttattttcttctcagagccagagggaaaagtttgttccaggcctcttttcttggcatgggtagctgttttcctctctgtctctttcaggttgtgtctgtgccccaggttcttcttcttctaaggatacttggattagcacccaccctgaagacttcttgacttaaccatatctttaaagaaactatctcccaataagggcatgcttagagttcttcagcatcttgcaggggagaaaacacagatcagcctgtagcctacctgagtcaggtaaagagtagcttgccaacacggaaaatctccagatgagattgacagaaaagaaaactgagtttccttgctgttgccatcagtgtttgtagtttcactgtcccatagaaatatattaggatcacatgagattttttatgtgtgtatgaatatatacgtatgtgcatgacagatacaggtagatccatgggcacactagcagtccagcttgatctacttggtgagttcaaggccagagacgtgtctctcatatagtagggaatgcctgaggagtataaccctaggttgttattgccttcctgactcacagcctcactattgtggatctcaaaagtataactctggcccagcagaatcatcacctctgttggcttattagaagtgtgaattcccagactctatcctacacatagcaaaaaagttccctccttttttacttaactccatggaatgggtcctgcaatccattttaagaactcagtactttcgttgtacctgaaaatttcaaaactatcatcttatggaattaccatgctattgatattgatgaagaaagaaaaaaacacaaaaccttttgtgttggttaggattttttaaagaggcgagctagatgttggacggattctggagtcatctggaaagaaagagcctcaactgagaaaatgcttgtatttgattggaatgtgggcaaacctgtgggacattttcttaattaaagattgttttcagaaagcctagcatactgtgtggagttgcacctttgggatgggggaggtcctgcattgtatagcaaaacaagttgaaagagccatgcagggaaagtccttaaacagcattctttcctgtcttcagcttcttttcctacttctaagttccagccttcagtttttgtcacggattccccaataataggctgtagcctacaagctcaacaaacaaacaaacaaacaaacaccctttcctctccaagttgctttaggcattttatcacagtgatagaaaacaaactataacagaaatcctttagtaaacaaactaagatcccctgtgagggttggctcaattctagagtagccaactgatctaagaatcacagccctgggagtgagaggatgactgtatttcagacatcactcctaggcacatattctgacagttaatatgtagcatcttggctgagtagctagtttgatatggagagaatacagacttttacagctccgtagcaaatgaaactggaaatgacaatttgtgtatttctgagtcagaccaggccttgaatgccaagaatgctgaattccagttggtcctggaatgtttgattatgaaggaagggggcatgaggccaagacaaatgatcactgactgaggacctgtacccaagtatgggggcaggaaggagaacaaatacactagaattggcagtatacaattgaagcaaagggacttaatacacagagaccacaataaaaatttaatagactttgatcttttcactttaatgcttggtttttgtagattcttgcagagaattgtcaccaagatctttttaatgggatcttgttcattgctctgataagaagaggaggtgacatgaaaatgataattcatacttacaggttagttcaagttggtctgtaagttagggggcatgctgtgtgaagctcgcacctgtacattagttctggttggtcaggaagctggaggaggtgctgtgtgcagctcgacagtattttcattttgctcaccttaggaagaacagatgatagaagatggctgcaaatgcttctgtgagctgtcaagtgcgtaatctcacagaagcctaaaacgtcttcgaattattcctgcattttaagatcaaaattttatttccaagtgtcttctttttttgacacttaaagtttaagttttccactccttatgaagttctatgcaactgtgcaattcttttaaataatttttcaagctgtaggttaagaatgtgtgggaagagactggacaggtagctcagtggttgagagcacagaccgctattccagtttggtttccagcacttgcacctgcacctgcatatttgctgataactgttggaacaccagtcctagtatacccatcattgttttctgacctctgtgaacaatagatatgcaagtggctcacagatgtgtgtaaagactaaacacccatacacataaaataaatacagttttaaagaagtggtcaaaatgaatgcctaaagaatatcagaataagataggattgtggttgcttcaaaatatttaatatagacctactacatgagccagaaattcctctgttcaatatctactgaaaataattgaaagtaaagtctcaaagagatgtccctgcttctttgtctacagtaacattattggcagctaccaaagcaagttacccaaatgtccaccgaaagatgagtagatagtcaaacatggtgcatctatgatacagagcctcagagagaaaggctggtccacatgctgtagcatgaatgtacatggagagcattttgcaaagtgaaaaataagccaggtggaaaggatcctttgtatgctttcatttataacatagaataatcttttttttttttgagacaggaagtagaattgtagttattagagctgtggaaggcaggactagaaagtgatgtttaaactattgtggcatttctgttagggatggtgacgtgtttctgccactgtggacactggtacagtaatatacgtgtatgtgcatttgactacagtgacacacagctgcaaacttaccagtgctaaaatttatgttatatctgttttacttaataaatacatgtcaacataaacctacatttaagcccatatttatatttattagtgtgtgtgtgtgtgtgtgtgtgtatgtgtgtgttcatgtgcatatgtgtatgcttgccaagatgaatttgtggagattagagaacaacattcaggaggtgattctcaacgttttaccttgctgaagcccagcgtctctctgggatagtactctgggctagctggcctgtgagcctctggccaactgtatctctgtcttcagcctcgtcatagacatgcagcattacagaattgagccactgcctccagattcttatacatgggttctggagatgtgtgagttcccagggacacactcaggtccccaggtttgagaagcagctgctttcacatcatgtcctgggccaacatttttgtttttaaatattctaatatgaatagtaaacattgtcatgtgtcatgcatgtatttgtgtaggtgctttacttaaaatccatcctctttgattttctaaaccttctcagacacatatcatcagtacctctgcctttctgtccctgcccagtgtggaactaaggaaaggaatagggaggcattggaaaccaggtgggcagactccagccctgggctcttaaaactcaacttacaaggaaatcagaattcattttactacttggcctaccacgaagaaacaataaaatattccaaggttctctttgtaagttctctgtaagcttttgctacaacttctttagattacatagaggttaggatttgctgtagtttggatatatatgaaaacatttttttaaagtagactccagccagggaagcagattggcaaatttcagttcttcacctattccttctcttctccaaatctaacctccagtctcatctctagctctacagtagccacttgctgaggctacccttgcccctgttccatgtccactggattacaaagatcttctcctcataaccccccatacattaaattgctttatcccagccatcaactccctcaggcaatccctaggaacctacaggccactccagtcagggatccagtcgactaactacggatcttcatgcttacttccattcctccaagtccaatcctccattctcatccttagctctgtaacaaaccgtgtgctgaagcctctcctcacactctgctcccattcccagaggactatgtaaattctgcaaagggaacaccctgatttcctccctcctgtgactccccacccctatcccagttgctaagtgtcagctcccagtgcctagaaagacaatacctggaaagcccaatacctagagctctcagtggccacacttatcagggttccagaagaattccctacaatactatcctgagaactacagaggaaatagaaaccaaggaacaaaacacctatccaaaaaagacaagatcagatatcaacacctggaattacagtctttcccaacccagatacttagacaccagcataaaaccacaataacaatatgtcttcactgaagccctgcaatcctatcacagtatgccctgaatatttgaacatagttggagcacaaaaggaaaacattaaaatggcctttatgcatatgatagaggcacttaaaaaggaaatgaagaaatccattaaaggaatctatgcaagcacaaacagtggaaggaaatgaacaaaatagctcaagacctgaaaatgtgaatagaatgaataaatccaaactgagggaggtgtggaaatgaaaaaaagtgtggaaactagaacaggagccatagacgcaagactcaccaagagggaagagagactctcaggaattggagacaggagagaagaaatgggtatcttcatcaaataaaatgttaatttaaaaaaaccctgaaatatccaggaaatgtgacaacatgaaaatgcaaagtcctctttctcttccggtctccggcgctgcgggagccgcgggttaccgtgcagacatagccaagtccaagaaccacaccacacacaaccagtcccgcaaatggcacagaaatggcatcaagaaaccccggtcgcaaagatacgaatctcttaagggggttgaccccaagttcctgaggaacatgcgctttgccaagaagcacaacaagaaaggcctgaagaagatgcaggccaacaatgcaaaggcagtgagtgcgcgcgcagaggccatcaaggccctggtgaaacctcaggccatcaagcccaagatgccaaaaggccccaaactcaagcggctggctttcatcgctcaccctaagcttnnnnnnnnnnnnnnnnnnnnnnnnnnnnnnnnnnnnnnnnnnnnnnnnnnnnnnnnnnnnnnnnnnnnnnnnnnnnnnnnnnnnnnnnnnnnnnnnnnnnnnnnnnnnnnnnnnnnnnnnnnnnnnnnnnnnnnnnnnnnnnnnnnnnnnnnnnnnnnnnnnnnnnnnnnnnnnnnnnnnnnnnnnnnnnnnnnnnnnnnnnnnnnnnnnnnnnnnnnnnnnnnnnnnnnnnnnnnnnnnnnnnnnnnnnnnnnnnnnnnnnnnnnnnnnnnnnnnnnnnnnnnnnnnnnnnnnnnnnnnnnnnnnnnnnnnnnnnnnnnnnnnnnnnnnnnnnnnnnnnnnnnnnnnnnnnnnnnnnnnnnnnnnnnnnnnnnnnnnnnnnnnnnnnnnnnnnnnnnnnnnnnnnnnnnnnnnnnnnnnnnnnnnnnnnnnnnnnnnnnnnnnnnnnnnnnnnnnnnnnnnnnnnnnnnnnnnnnnnnnnnnnnnnnnnnnnnnnnnnnnnnnnnnnnnnnnnnnnnnnnnnnnnnnnnnnnnnnnnnnnnnnnnnnnnnnnnnnnnnnnnnnnnnnnnnnnnnnnnnnnnnnnnnnnnnnnnnnnnnnnnnnnnnnnnnnnnnnnnnnnnnnnnnnnnnnnnnnnnnnnnnnnnnnnnnnnnnnnnnnnnnnnnnnnnnnnnnnnnnnnnnnnnnnnnnnnnnnnnnnnnnnnnnnnnnnnnnnnnnnnnnnnnnnnnnnnnnnnnnnnnnnnnnnnnnnnnnnnnnnnnnnnnnnnnnnnnnnnnnnnnnnnnnnnnnnnnnnnnnnnnnnnnnnnnnnnnnnnnnnnnnnnnnnnnnnnnnnnnnnnnnnnnnnnnnnnnnnnnnnnnnnnnnnnnnnnnnnnnnnnnnnnnnnnnnnnnnnnnnnnnnnnnnnnnnnnnnnnnnnnnnnnnnnnnnnnnnnnnnnnnnnnnnnnnnnnnnnnnnnnnnnnnnnnnnnnnnnnnnnnnnnnnnnnnnnnnnnnnnnnnnnnnnnnnnnnnnnnnnnnnnnnnnnnnnnnnnnnnnnnnnnnnnnnnnnnnnnnnnnnnnnnnnnnnnnnnnnnnnnnnnnnnnnnnnnnnnnnnnnnnnnnnnnnnnnnnnnnnnnnnnnnnnnnnnnnnnnnnnnnnnnnnnnnnnnnnnnnnnnnnnnnnnnnnnnnnnnnnnnnnnnnnnnnnnnnnnnnnnnnnnnnnnnnnnnnnnnnnnnnnnnnnnnnnnnnnnnnnnnnnnnnnnnnnnnnnnnnnnnnnnnnnnnnnnnnnnnnnnnnnnnnnnnnnnnnnnnnnnnnnnnnnnnnnnnnnnnnnnnnnnnnnnnnnnnnnnnnnnnnnnnnnnnnnnnnnnnnnnnnnnnnnnnnnnnnnnnnnnnnnnnnnnnnnnnnnnnnnnnnnnnnnnnnnnnnnnnnnnnnnnnnnnnnnnnnnnnnnnnnnnnnnnnnnnnnnnnnnnnnnnnnnnnnnnnnnnnnnnnnnnnnnnnnnnnnnnnnnnnnnnnnnnnnnnnnnnnnnnnnnnnnnnnnnnnnnnnnnnnnnnnnnnnnnnnnnnnnnnnnnnnnnnnnnnnnnnnnnnnnnnnnnnnnnnnnnnnnnnnnnnnnnnnnnnnnnnnnnnnnnnnnnnnnnnnnnnnnnnnnnnnnnnnnnnnnnnnnnnnnnnnnncatccatccagccaaccaaccaaccaaccaaccaaccaaccaaccaaccaaccaaccaaccagccaaccaaccagccaaccagccaaccagccaaccagccaaccagccaaccagccaaccagccagccagccagccagccagccagccagccagccagccagtcagccagccagccagccagccagccagccagccagccagccaaccaaccaaccaaccaaccaaccaaccaaccagccaaccaaacagccaaccaaacatccaaccagccaaccagccaaccaaccagccagccagccagccagccagcgagccagccagccagccaaccaaccaaaaaatggacctgacatatatttacagaggtttttgtttggttagtttgggtacttttatttgttactttatttattttcattccaaatgttgtccttccagatttcccctccataaaccccatatctcatcctcccccctctgcttctatgagggtgctcctctatttacccaaacacccactcctgcttcactgccctagtatctccctacactggggaatcaagcttccacaggactaagggcctcccctcctattgatgccagataaggccatcctctgttacatatgcatctggagccataggtccctctatgtgtactctttggttggtggtttagtccctgggagctctggagggtctggttggttgatattgttcttcttcctatggggttgcaaaccccttcagctccttcagtctttcccctaactcctccattggggaccccatgctcagtctgatggttggctgtgagcatccacatctgaattggtcatgctctggcagagcctctcaaaggacaactataccaggcttctgtcagcaaacgcttcttggtatcagaaaaaaaaattccatcttctcaacagctcatggaaccttctccaaaattgaccaaatattagacacaaactaattcttagtaggtacaaggaagttgaagtaacaccctccatgctatctcaccatcatggattaaagctggatataaagaacagcagaaataatagagtgtgtacaaacttgtggaacttactcaatgaaaaatgggtcaaggcagaaacaataaagaaatgaatgacttccaagaactaaatgaaaggaatgtacaacataaaaaaacttatagacacaacaaaagtggttttaagaggcaagttcatagcactaaatgcctacatagaaaaatggggaaaatctcatactagtaacttaacagcacacccgaaagctctagaacaacaacaacaacaacaaataaataaataaataaataaacaaacaaattacacccgaaaagaagtagatggcaagaaataatcaaattcaggactgaaatcaataaaattaaaacagtacaaagaatcaatgaaacaaagagttggttctttgggaaacattgataaaactgaaaatgttatccaagttaactaaaggcatacagaatatccaaactaccaaaattacaaatgaaaatggagacataacaacagacaatgagagaatccagagaatcctaagaacattctttaaaaacccgaactccaccaaattggaaaaccttaaaaaaaaaaaaaaaaaaaaaggataattttcttgtatatgctacttaacaaagttaagatcagataagcaatttaaacacatctataaaccctaatgaagtagaagcagttgttaaaagtttctcaatgttccccaacaaacaacaacaacaaaacccaactcatgattagatgattttagcacagaagtctactagacttgctaggagttaaatacagtacttaaattattccacaaatggaaacaggaggaatgttgcccactatgttttatgaagccataattatcctgataaccatacctactaaagacccaacacagaaagtgaactacagattaattcccctaatgaacttagatgcaaatgttctcaataaattacttgcgaacagaatgtaaaaacacattaaaatataaccatcatgatctagtaggcttcatcctcgagatggcatatgtaaattggtatatataatccaccttagaaacaaactaaaaggcataaaccatatgatcatgtcattagatgcagaaaagacctttgacaaaatccaacactccttcatgataaacatcttgagattagtgatacaatggacatatctcaattcaataaaggtagtttacagcaagcccatagccaatttaagtgaaaacagtaattccattaaaatatgaaataagacaaggttgtctaccctctccatatatattcagtatcatgcttgaagacttactagagcaataagacaactgaaggatgaatgggatacaaattgaaaatgaagaagtccttatctttatttgtagatgatatgatagtatttatacaatatcctaaaaattctactgggtaactccttcagcaaagtgtttgtttcaccaaagtgtttagctgtatacaaaattaactcagaaaaatcagttacaaatatacatataacaagtatacaaatatacaaatatatacgagtatataaatagcaaatgaacttatgaatctaggaaggaacacatttcttgatgggctcaaataatatgaaacatattgtggtagctctaactaagctgaaaaacttacaagaatctttaagatgttgagaaagaaattgaagatatcagaagatgaaaagaacttctatgcttatggataggattaatatatatatatatatatataaatggccattttactaaaagcaatctacagatttgatgcaatccccataaaattccaacacaattcatcccagattttgagaggactattctcagttttatttggaaactttggggaggcagtagctgaggtgcctagcagtggggacatgagcctagcatatcagtcctctgagaggctctacccagcagctgactgaaacagatacagatacccacagtcaaacactggacagaggtcagggactcttatggaagagttagtggaagaattgaaggctttgaatgcgatgtgaaccccacaggaggaccaatagaatcaactaacttggacccctaggaactctcagagactgagccaccatccaaagaacaggctggaacaaagactctgtttcccaacagggctgcctgtctggcctaatctggcaaagacttgatgtgatagggtgtggggatggccaagagtccctttcctaataagaaaaggggaaggggtagagaaacggactctgtgagtgggtgacctggaggagggggcagagtttaggatgtaaataagtaaatataacaaaccaaaacaagacaaaaatcccctaaaaacaaaaccccatatagctgaaaaaatatcccaactattaaaaaatgaaaccatgaaattctcaggtaagtggaatgaaccagaataaacagaaacaaaacaaaacaaaacaaaacaaaacaaaacaaaaaaaaacaaataaaatcatgctgagtgaggtatcccagaaccagaaagagaaatatgttatttgcttatatatagatataagcttttacgttcatgataaccaacctaaaatctatagaaccatcattacatttaaaggatctagggggaacagatagacctcattagggatgggaaatagaataggtagttatggaagcatcatgggagtgcttgcagtgggacaaacaaatgggcatgacactgagggagagaatacagggaagacaactaaaattgcaggccatctgagggttagtatgaaaatatagtgaagttgagcctttcaaaatacatatatgatagtttaactaaggttgacatataatgagggagacaaagcctcaactggccatctcatcactaggattgagttacatctaattgagttggtggccaaaagaggcccatgggaatccccaaacaacccaggccgttgccaagacagtgctccacaaactgagggtaaggtacattgctgaagacaacacctacacaactcattgtgttgattagagaaatcaagctgatgcttccatagggctttcacccccgtgttctaacatcttcagtacctggaggtaatcggcacataaccaaaagataaacataatacccatgaattaatccaacagaaccttggattaatattggtgtcatgtctgtaagtcatgccggtgcaaggttggtacaaagcttgtgtgaagaaccaaccaagaagtgatctctgtgagatggaacaatgtcatatctgacattgcttgggtgatcaagaacctgcctctaaatagtacagggacttgggataaaatcagatactatttctttgttttgttttttaaagtagaacttacaataaaatgtcttgtaatggcactctgctatactcatagagtggtgccttcctaagccatcatcagagaagtgtcctccttcagcagatgggaaaaaatacagagacccagagccaaataacatgcaagagtgagagactcttcaatctctctctttgggtctcaaggaactctgcagaagaggaggcaaaaagagacttaagaaccagagaaaatggaggacaccaagaaaatgaggccctgtaaaccgacaagaccaacatatgaactcacagagatgaaggtcacatgcacagggcctgcgtgcatctgcaccatatctttggtttatattatgccttccatcttagtatttttatggaattcctcagtgtgtgaatgaatggatctgtttctggtgccttctcttgtgatctttttcttctggttgttttgtctattccgttgcgttagtttttgccttaccttatattttattttattagactttactattattgatcccttagaatccccatgtgtcttctaacaagaaacagaaaccaagtggctctagatgggatgggaggttggaggggtagaggtggggtggaaactgtaatcaggttatattatttaagaaaaaaaatcttattttcaataaagggaaaaagtggctagtgggactttgtgggtacagcttctgatgtcactaggagagacaatctattgttttggttgtgagccacgcctttaatgagtggattatctctccagctctaggagagatgacctcacaacacactctctgatcctctggctcttacaatctttcctccggtcttctgcaatgatccctgaaccttaacatataggaaggttttgtcgacatattgattgggactgggctggagctcactctttgttgatttgttgtggttttctgtaatggtctctgtctgtggcaaagagcagtgtccttgaagactggagaagtctacatttatctgtgggtagaaggacaaatgtttatacattgttagggattgtgctggcttagtagattagtgcttgtagattcttctccaataaccatgttttcacaaaaccatccagatatgagctgaacagggatggaaaaaatgaataaactgggtgggaaaaaaggccatgaggtctcaatactctagaaagaattataggcagctgaggagtcccagaggtgttcatcccaaagagaagtgcactagttggttgtatagtgccaggcagtcagccctaaccgtatatatacaagaaacatatggactcaataggctatatttagtaatatatatgcatacacagtaataacatctgtaataacaactttgaagaaagaggttagacattggaaagggagtgggacaaggtatatggagagcttgggaggaaagtaaggaaagggtgaaatattacaagtataattaaatacagtcttaaataagcaccaccaacaaaattggcagtgaagtcactccagtcctacacaaagaactgcagacaactaagggactgagggagagggagaggtcaggagagcacgacggttacccaataccaaatagtcagccctgaaactatacatctgagtaacattatttagactacgcaggttatatttagggttatatatgttcatgtatataaacatatgcatgtaacaacaattaatgaaaaaagagtacttgaatttgagatagagaagggaagggaatatggaggggaggaaaggaaatcatgtaattatgatcttaaaagagcaacagaaaaaaatgggaaactgtattttcagccaaggcctgagtagagtacttcaaccctaaatatgctcatgtggggtggggaggtctcataggatcccacccctcaataaagaatggtggtgccctaatggctgctgagagaggcagaattagtcttcccaagtgatgagccacttgcttgggtatctaataccaagtggtcagccctggaaccacatacccagaagtcacagtacatggactcagcaggtgctgtatgtgtatgtgcacatatgcgtatcaaatcatgggaaagaggccatgggcctgaatcaggagagtctggaatgaggagacagggaaggagttgaaggaaggaaagcaaagagcaaatgatgtagttttacttgaaatttataaaaccgtgtttgatgtgtttgtgtgtttgtgtgtgtgcgcgcgcacgtgcgtacaagaagtaagtttttgaatattgccagaaaaacagaacacatctcaacattgtttgcttttatagcacaatgcatgcaactgagcttcatagactcgtgcctgaaattcatagtactatttgtctatgatgttttagattagtatgtggaatttaaacctgcaataatttcctatgcacctttccaagtatttgaaagatggccttatttactgttaccttggaaacaataatgcccaaaagctatgcttactctctttggtacaattaaaaatcatttatggagcaaatgtaatttaaaatattatcctcaagcatggattttaattaaccttaattatatgaaatatgtgatgatagctagtgttaacattatttggaaatctaaatatagatttctaacagaaagtatgccagtgtcttgaaaattgtgtcttaataaatgcatgcattactatcttccttttccagttaaatagagatgttcttattattgcttaactctgtcagttctgtgtctgataacctttaggtatatgtatgtgcatacgatgatgtgtgtgcaagggtttgcatgtcctatggtgcgtgtgtggagatcagagaatagcattggaaagtcctaactttctaccatctttggaacaacatctttttgttgtttaccgatgtttataccaggcttgctagcccaggggtttctggggattttcttgtctgtacctcacatattgccttaaggatgctagcattaaactgtctattaccatacttgccttcatgtaggttctagggatttgaacccaggtcctggtgtttgtgtagacatgagtcattgcttcaggtgtatgatgaataattctatgaagtttaaaatgactgactactttgctttaaatttttcttaataattgataacattgaagagtcacttaagagttgttggttcttagaaacgtcccaaaggggcatggattgatgtgcatgctttctttccttttccaggactccactattgttactccaattattttgaggactgatcctcagggatttttcttttactggacagaccagaataaggtaagagataagatgtctttttcacattatcctgttggtctcttacacagtttaccttatgtatgtctttccatttcacagatgaacttttgcagtattatttattgattctacttccagagactcaggctaagggccttaggacttttcaaagatgcttgtgtgaaatgctggagtcactagatcctaaaataattattattgttttctgttggacttgtggattgtatttggtggtgaacatgatttttggaccttcatcgatttaaatccctttcaatgcagaatgaagaaagtcagtgagaaaattctctatgattttaatgaccaaaggttgaacattcattccttctcatttctccctgtgctataatgaacagttctcccggtagtaatctgatatggccctgatagttcattaatgtttgtgatggcaaattgtggttgtcaatttgtcacatctggagagagggaaccttagatgaggaattgtctccttcattgtagacatatatgggattcttatgacttacaattgatgtaggagagtcaggcctgctgtggacagtaccattccttggcaggtcggcaggcctataagaaaggtagtcgaacatgaacctgggatcaagccagtgtatagtgtttctctgtggactctgctttagtttctgattccagatttcttccttgagttcctgcctgggttatacctggttatatattgtaaaccatgagccaaacaagccatcacccaagctgcttttgatcctgtttatcacagcaacagagagtaaaactggaacagtgttaaaaaattaaagctactttttattgagttttcaagaaacttcccacatttaggtttctgcccacaatactaagaattcagtagctcaattcttataaagccagttgacaatcctgtactgaattattaaaaactgtctgcaaaccataagatttatttgaggtttaatggggagttagacaagaatattccttagaagtggttatgttttcaagagtcgctggcacctaagaggcccagcacatagaatattttcatcttctaatttctgacatctgaagaggtagtttgttgtcattattgttttgagatcacagaatacatttagaagccaatagggaagcaaaactaatagaatagtattagaacagataggggctcgccaattactgtacagtgtggttcaaatattagttttgaagcccatgttatgtaactgtgggcttttctacccacgccctagttcccaaaataatgactctgatgcttattatttatgaataaatgtccaggctacaagcttttgctttatctctgaatagcttgccatttaattaacccattcattctgctctgtgagtgccatgcggctggtaacctcgcctcagttttatatgtctgtctcctcagagtttggggcacatttctttccacaccagactcttatctcagaattcctctctccctcccagaattcccacctcctatttcctgcctcagataacaggctatcagctttctattgacaggtgaaatttccatacagtacacaagagattctctctacagtggtagattccagatatccaaagtccttggataattaatcttaggccttgtcttgggcagcccttcacacttgtgtgtacatgttgtaactcctcagaattgtggatcctctcaggaacttttctatgctgaaaaattattatctggccttcaggtcagccctgaaagggccagctcaccatcttaaaaagcaaactctattgtaatggtgtgtggagtatatctaaccatgatgtgtgtttgttctggaagcgtctattaccatagatgtgggaggaaactatagaatttacacccgggtcaggaattatatgtgggtaagatctcatatttattgttcttgtttgttactgggtgtgttaatcacattgtcttcaatattctgtttggtttcctgctgttatatgtaaaacaatggcttcaaagatttttttttcactcctaagaactatttttggaacagtcacagctatatttgtgaaagatttatttataatgcctagagcatttctaaaggttgggtacttgtacaagagaccaaactgtcagtttgattttttcaacttgtaaatcaaatttccataaaagcaccagaagatattttggggattttaaataattcacagcaactcagttaagcttctctggaagactaatcataaatgtttctttgcttaaagaggagaaggagaccaaaggctctttgatggatctctattgttttgagagatcaatgttttgatcctgtgtgtgtgtgtgtgtgtctatgtatagatatacacacacatacatatacatgtatacataatacatatgtgtatatatgtatataaatgtatagtgttttcagtggagaaaatggctttaagtgttttatactagtctttccttcttggtcatataactaatgggagcaaattatggtgggaaggggggagtgattgtttctttattgcttttcttcttatggatattaatcttagtcaagaaatggtaaatttactctttaacttcttagatctttcagtcattcctcagtcatttatctgtttagggctttatttttttagtcaatggtcatatattttaaacttgaacagatgagcggattcaagaaaataataataaaagaaacttaccacattttcaagtttgtcattttctttctggctttaagcccagccttggaaccagatcaagtgatgtatccactttttggtcttggacgactgtaaacaatgcattagaatccatgcaggctggacaaactgtgcacacaaacagagggcagcatgccagcattttagtcgaggttgtgcatgggcttctttacaggaaccgggttgagtggtgccagcacacgctccgtgcaggacccgttgttcaaagtagtttgttttcctggtggttagtattcggaacgcgccctctggcttatagagacctcagagagcgcaatgtaagtctttcaaggttaccatttgagtctccacatttgttttccgtgattgggaagcttacagtggtatttaacataagacacctcctctttctgagctgcccctcagcatgctctgcctttgatgcatgaagttcttgtggaagctccttgatgagtaattgctggaaacttcctgtactcacaggtaagacgagtggttagagagccactcaaaagagctttgttgtcagagcttggctcatctggctctgaacggagcccttcccattcatggtgtctaacgtatgtccatttccgggcatggctgtatcctgcctttcacctgtcctgatttcaagctcctggcttcctctctgtagaccttgcagtgctgcctcaccaaccgctgccttgacttgtcaccgtagaaatgacaggtgacaaagaagacagagagcacagatgagagacttcagaattcaacaccagaactggcaagtcccttttagagagctgaaatgtgtgtagcgaaacactggcaggatgtttggcttggtgcaagcagatgaacgtgaatatcacttctagagataaatgttcatacttttgttctgctgctggacttattttgacaatttttctactgactgtcggttctgtaaagaatattgaatataattagcagaaatgagttactgaatatgattattttattttaagcatagtggcttttctggtataagtgtggagtatgtaagaaggatgcatttatttataagtcatgggtgagaagaagttcttttccatcccaagtgccaaaaaggttgccttcattagactatgccacatggataccagaagccataacggggagtgctaggcaaggaatccaagtctctatgaggatctgagaaaaggctcaacacagaggaacccacaaactcctgcccaaatgtgagacaggagaacattgtcttgcagtttcaagccctgtttctgtgccaagttttgtgtaaaaataaaaccagtttagttcagatctgagaagctcaagaaacttcaataaatccttccttctttccctaaacgaagagccctggggaaaggaagacaagtatataagattgaaaatggaatgagagggaaaatttttgtttggtgaaggactctgtactactatattttgatacagatctttttaaactgcagataatacataaatagtttccctctagtaagatgttaaagcagtataaatatctccaacattatttgataaccccaatcctagtgcattctctgtctctctgtttctttctgtctctctgtctctgtctccctgtctccgtctctctgtctctttctctctctcgctctcactctcgctctcgctctctctgtgtgtgttttccatccaggagtgagtaccatctttatggtttatttctgggtttctttcatgaatctgaagcacataactatgtaaatattgcattttgttttgtttgaatccaattgtatcttgttattatatcattcctgctattttaaacactgtctttgacttctctgaatgttacagatgttcatgtatgaacctaccccatccttttaacttgtacagatgtgtcctcatattgaattgcaaatttttatttaatgataatgaagtttccattgaaggattcttggtgtttctatctaacttggggcaacaccaaacctcctacaacacagagtaatggccagcctgatgttctgtctttgggtatacatgttatagattctctaagggaaatacaaataccattgctgtgtgaaagccaaacatgactttaattttagtctttggctgtacctacataatgttatgtgagagaaacggttcttatgcctcagtcaacactgttaggaaacattcaacttttgcctgactgatgcaactgttgtatctatctacgttttaatctgcccttactgatttgccaggaaactgagcatcttttcggtcattattggccatttctgttctgggttatttaccacatcccctgctcttgtgttgttacttcttgggttctagctgcagagtgaatcttgaaaataaattcttctgtctgtggcttgtcttgaattccccagcatctaattcatgcatggcgaaagatggcttgaaatctgaaagtctgatggagtcacatttcaacttttgtttcttttttttcctgactcatcatccttattgctatcattactgttacttgaggtttggagcacacatgtaatggatactgatgaatggcatgagatggggttcataatttgatttcttctagtaggttgtcctatgagttggtggttccctacactttctagtcgtagccagtgggtagcaccctatagcaccatttgctgtgggatcttctttttggcatagaggttgagggtccacgggactgcaaaggcattgtactgacctgatgctccattatctcaactgacttgaatagcttgaaatgtctgtgcctgtgggcttcatggttgtcattacctactttattcctagttaccttctgcctttggcactttctggttgagcaggcaccaccccttctgtttgcatgtaatttagattacaggcatacatttctactttcatgttcactcatttctgggaaacagcataggaaggattgactctgctccctgatccatctgccactctctcctcctctaggactttgtgtgaggcagcctgtgggcccctcggcccaagtgctgatgtctgatgtttctgtaaatgtcagcggtagatacccttctcttgtaatctgagatttctatacagagttcaaatgaaaagtttaaaagttaaatatttacataagccacggtgatatttttaaaacagaagtccagagctaagaaatattttggatgatgaatcataaacctcacaaaaaagaatcatgtgatttcctatgaaaaaaaccattctggcttccataaagaatggtgggcccttgcagcaaaatcttgctagtgtatgcaatggtgtcatcgtttggaggctaattatgggatggatctctggatatggcagtctctagatggtccatccttttgtctcagctccaaactttgtctctgtaactccttccatgggtgattgtttccaattctaagaaggggcaaagtgtccacactttggtcttcgttcttcttcagtttcatgtgttttgcaaattatgggggacttttgggatagcattctaaatgtaattgaggaaaatatgtaataagaaaaaatatttaaaaaaaaaagaatggtgggcccatgttttaagatgagcgacttggcagtgggcttcctctttggtagacatgtgactagtgcattccaggaacatcatttctgatctttcttccctgtagtactccagaaatgacagcgtgcttgaacataaagatgcagttacaagttaaggttgagggttgctcacttccgttgacttttccaagaggctgaaagaataaatgacgtcactttagcacccagcacaactgatgtggtgcagctttgtcagtgcagccactcttcctgggccactgcagactgaatgatatcattgcttttctctctccctgctctgccttcccatctccactgtcagtgagacagatggaagcagtcccacaggtgccacctgctccttgcctctccataggacccccagctgtgttccagtgtctacccagcatcggaaactttttgctttttatctccagctgttagaaatcacctcacatccagtgtattctggtcttagggtctgatctgatgggtacgtatcatatcaataccagctctttaggctggaaaactgagaggtgcatgctggctgtgaattcctaaagtgctcctataaaatgaaacccactcacttgttaactggtttgaaaaaaaaatatggctttcttctctttctatctccctttctcacccctgctgtatcctagaaccacttctaaagtcatctgttttcactgtaatctttgtttggggttgtcttattatgtatatgtaatactaaataggttagtgtagatgtgtcttgaatcagcatgataaacctataagaatacctattctttcattaagagccactactttaagccagggctggtttccctgaaacagaactaatttatatagtcatggcagatgtgcctgccttcgggttcagtgtctgatgtcttatgtttaataagtcacctcaggtcttagatgactatctgtttctgccctgctttgttcatctgtaagaaagcattgctaagttaggataaggatgaaggttcactgtaaacaataacatcatgcctacttctttgtgaacacccagtcctttgtggtgacttttgttataaacaatctctgactacccagttgttcctaatgcatttttaggggccataaatgtgcggctttgaaagccaagtgaccatttatgtacgtttgcatttttattcccgtttttcttcttgctaaaagtgacctgctttctattcaggattattgtgctcttttgatctagagcactgaagcttggggcttgttgggcaaacaagatgtttgtttatgtatttcataatgttttggaaacagagccatggaaggcgaaagaagggatttattgccagaaagacgtttcctctgaggatattcactaataaatactccatcataggtgaaagttttttagaccataggggatttgaagcatcttatggaatacgctttaagatgatttaaaggtctttgataagagaaaatggtattattatcctctaggagactctgatgctgcacagttgcctatgtcttttccctaagataatcattttgggattatcacagttatactggtcccaggcattgtttcttacccacaccgagttgatccttagaagttaggattctagtgtttctgagcacaagcaaagcactatgggattgctagaaacaggcatttgtcttgcttatcagttgaatttctcattaggttccatttctatcaacactgtcttttcactgccaggacttccctttggttttcattacaataaatgctggctagtgcaggggagtcaggtgtgagtgaggcttagtgtttgtagacacaacttaagtgtacatagtattagaatggagtttttcatgtatccttggtggctggtgattcatgacattttggtagaatttctgatcaagtacagtttcttgaagtgtattttaatgtcactgtagttatggtgaaatgtcatcctaacagtttctttgttgtttcgccatcactgtgtgtctgtgtgggagcagcaatagcaagatacatgtcttcgaagtagaatgggctatttcccacactatgaagctattcggaggggcttcaatcctttctggtagaaacatgatttgaactgtggaattggaagaatgtgtggaggaaatacatttgtatgttgtttatggttttagttccttttatgcagacagccattgaccttattgtgccagcttgcttgagccgcagatgtctcagagacagtgaatggtcttggttctttcatggttcattttcttgccaaggcaacttgtttgaccctacacatgggcttctaccaagctctctctatacttaataaacaggacacagttctctttgtattttggtgaaactaaatttagatcctcattttgaaagcatttatcaccacacaaacaagaccaaagaaagtaacgtaactatttggttccatatgtcatattttattattgtttcctttatttaaataatttaaaaagggaaaaaaagcaacatttgagcagtttattgagaagctgttatccacgtacaaattcaagtctggggaaatgtttcttcttagtatgtttattttcttgtatcttttctttagtgttagtcttaccagtagcataactaacaacaaatacacctgtgatattttccatatgcaaaataataaagaaaaagataggagaggtatacatacagtatataaatgtattgtttatgttgttatatatttaaataaatatacagcataatagtaaatatttatggcatacagagagtgcatattgtgctccagtgaacttttatgatatgcatgtatgcacaaatacatacatatactatgtactgcaatatacatatactactatacaatgtatcattatgtgttctaatatatattgtgatgtttgtacattataaataaaacatgtaccatatatatactactatacaatatgttatttcatgtaatatagtgtttgtatattatatacaaacatcttatatataatatatattgtttatatatattaatataaaaactttacaaactatgtcactgtgttataataatgtataactgtgtaatcatgtccataagcctgtgcaggtcagtgctataattatcatcatttataagcaagtcaatttaagtgcactcagaagtaatgtactgacctttggttatgtggttgacccatgtcagaaatagaatcatgacagggccgtctggccatatggcctagattttaacattttatattttcaagaagctgattaatgtgttagattgtttatctgaaggacttttctcctcagatttgtttgaataaggagtcttaataggcacaatacattgtccgagaagaagcagagtatgaagaaggatgcccaacctggctgcacaatagaaaccattggagaagctacaaatagtactgtgctttgctccacactccctcccctaacacaacaattctgctctactgggctgctatgtgggggtgaactttatttttaaaaatttcctcatttgtttgtatcatgcagcccaggtgagcatcaccaaggaattcatgaaacttagaggctgcgtacacgtggttctggcagcctgtgccgtgacctgctcttcatcaggaacaacacccgccatgaacaatcacccatagttctgacacaattctgaattatttgaatatgattggatgatattccttaaactgtatctagtaaggtaggaaattactggcagttgtagaatgtttcttaatattcaagactgaaccagaatagcacttcttgttatatttttttttctttccattttttactaggtatttagctcatttacatttccaatgctataccaaaagtcccccatacccacccacccccactcccctacccgcccactccccctttttggccctggcgttcccctgttctggggcatataaagtttgcgtgtccaatgggcctctctttccagtgatggacgactaggccatcttttgatacatatgcagctagagtcaagagctccggggtactggttagttcataatgttgatccacctatagggttgcagatccctttagctccttgggtactttctctagctcctccattgggggccttgtgatccatccattagctgactgtgagcatccacttctgtgtttgctaggccccggcatagtctcacaagagacagctacatctgggtcctttcagcaaaatcttgctagtgtatgcaatggtgtcagcgtttggatgctgattatggggtggatccctggatatggcagtctctacatggtccatcctttcatctcagctccaaactttgtctctgtaactccttccaagggtgttttgttcccacttctaaggaggggcatagtgtccacacttcagtcttcattttttcttgagtttcatgtgtttaggaaattgtatcttatatcttgggtatcctaggttttgggctaatatccacttatcagtgagtacatattgtgtgagttcctttgtgaatgtgttacctcactcaggatgatgccctccaggtccatccatttggctaggaatttcataaattcattctttttaatagctgagtagtactccattgtgtagatgtaccacattttctgtatccattcctctgttgaggggcatctgggttctttccagcttctggctattataaataaggctgctatgaacatagtggagcatgtgcccttcttaccagttggggcatcttctggatatatgcccaggagaggtattgctggatcctccggtagtactatgtccaattttctgaggaaccgccagacggatttccagagtggttgtacaagcctgcaatcccaccaacaatggaggagtgttcctctttctccacatccacgccagcatctgctgtcacctgaatttttgatcttagccattctgactggtgtgaggtggaatctcaattaattaaaatatgttagcttctcactccccaaaatgtgccggtgttctgtgcttaccaaatgtccccatataagcctgcctgccctcctctgtgtccatcagctagcttctctactaggtaaagggacataattaaattagctgcccctttgaagaagggaatgtgtagtaagagtggctttaaagagcttaggtggcaacagtgacagagtatgtcttagcatctacaaggctctggtcaatatttagcatcccaaaaccaaatcatatcaaactaaaccaagccaaactaaaccaaaccaaatcatcaaaacaagttttaaaataaaacagcccaaagaaaagataactccaaacatatatgattatttaattttataactaaagttttatctacaaataccaagagcatcttattaagttgcagcattgtatcatttcttgtccgtttataagaattttccctttctttccacatacaccaaccagagaaaccatggaaagtcaggtattttcacgtgggataggaagcctgccttttagtcatctttagatggtacccatgggcaaagcaaaattcacatttctctcgtagggattctttgtctccattctgccttctgcaagggttgttaccagaatgagaatgattttgcatgagatttctgtccagcacggtgtagaactctgctttgggtctgtggtctggaaatggcattgtaccgtggcaggcagtgcacctgtgtgaaatgaaggcgtcaatgaaaagttttatgaggcagaactagttgcgatactaagaagctaatgactgtgctgctatacataatggattctatttttagacgaacatttgttcctcttgcatggcttcattatgcaaggggacagcagcttcagcactatattttgaatactgagatattagaacactagagtgaatgcaaccttagatacgttatgactttctcatagacttgtgcccttcctggtttataattaaagagagagatgaaatcaaaaagttaaaaaaaaagctgcaggaagctttggtattggctgaattctttcagctgtcagcctcaagctttattcagggtgaccctttgacatatgacacacagtggggacgtgaggtaggcaaacaaaggcagttaatgtgaggtaagtgcttaaataaatacaccgttcggtacatgagagattccattcctctttgaagctctggagacagcacagaggagagggagctgtggcaattacccaccaaaccccagaagccagtgagcagctcttttggggggggggggtattgtcccagctcttgtgccaacttctcttgctccaggaccataagtcaagccaattccaggcttcgagaaagctctcattcacagctgcagctgagatctgtcagtgatgtgaatgggtgtgtgtgagtgtgtaaataatactatcagcagcgactgcttttgaagcctttgttttcagtgagtcaaacttcctatatctgtgtgctataaggtactacagttgagcacattcataaacagattctgcttagtctgcagaatgctctcacatttcaaaatctagggagtttatatgtagatctagatttctcaaacaactatcacaaaaaaatactgtccaacgggccccaacagccacatttagtcagagcaaagcagcagatgcctgccacagccaggacatgtgacatccaatctgccagctcccaccaggccagcctacttaatttacaagaacctgtacactcattaggcataaacatcaggtctctggcaatatcctatttggaatcttcaatacattagtgactatgaaacttcaagtcaagtgctgttaatttggtctcaatgagccatcggaatatgtggcataaagattgagtttcgcagtggaaaacatggctgaaggtcagcatatttcaggcctgcacctcagtgttttaaagaaaacatttgtttctctaagcctcccctcctctctctgaaatatggatctgaagtgtgtgtgccctggggtcctgtgccactttaaagggctattactccaaagtgactttcacgtggcattgggctaggtaagatttataaatatgactccttggcaaaggatttctagctgaattgctccatcaatctgaaggaaatatgaatggtagagtcagacaccaggcacaatgacttccttttgtggaacacaagaattgacttcacttcctgctcatcatagtgagcagtgaatggattgtgctgtctgatgcaatatttcctatgtacacatggttttttaatgaaatttaaaaattattttaaattacaatccatttcctttatcatagtactcccctgcgcccgccccactcgagtgctttgtagcaacctctggactcatgttcttagggaacattcccatgatggtggaaaatttcactagtcattgatgggtggaaaatggatttgagatggcatttctgagccagtgtacagtttccttgtagtgaggtgttactaaggtcttgcagaaaatgaaaatatccctctttcgttagattgtggggtataggtattgatagagggaccagcctttgttatttatttcccatggaagaagatttggggatagttcaagacactacttttgagagtcaaatggggaaacgaatcctgaagaaaagtgtcctagtcagttttgagttactacaaaaaggtagttaggctcaattctgatagctagtggctccaaagaacatggctgtgtgcatggggtagccttactttacgccaattagcttatatggtaattaactcagttcatgcaagctaattgtgtcaggtttttccttggaaggctgtttctaaaccttttggtttggagtggagtctctctttggtgctattggaacacaccatcattcttttcaacttaacactttctgtgatgtgttaattctgtctaatccccttttgcttggccattagatgacgaagcccttgaattcaaggatgttacccagtttccattacctatttctatacactgctagtatgcagtaatttctcaataggtgtataccaaatggctgagactcaggaaggttgtacagtagcttgtctgaggtcaaagattactaggtagtaaaaggcccatctgtcagtgtccaaatcccaggtttgttccttttgtaactcattcattagtctccttgcttcagctgccagctgcttccctcagcatttatatgacctccaacctttggttggagaaatgggaacacttaatgggacgtctcctccaggttctaagtcccagagtcacccccatctccttctactcctatgtgtctcccttcccaggtgctctctgtcttcttggtccaggagcctggattctcaatgaatttacactaatgtttatttcctgtgttcattgagctatcaatatttccactacaactggctctgtacattattaactgcagagtgcctcttctgtacaagagaactctgttcccactctaggacctcacaaatgcaccttttctgtcttttcattctcaccaatctcgttctgattctctccattcacctgttccttaatcgatgttcatctgggctctgaccccatcccttctccacttcccatccttaatgttttaggtgccttttgataactcagtgtcttacaatactgattgccctatcttccttgaaatgttgagctaacttccatcccttcctgtaatggttctctccctccctagctgtccacctcagtcaactttcctagagctgaatagcaccccttctttagtcacggtccagggactccacatctgctcttcattcactaccgggacacatggccctccgccttatctcctcaaacaatatcttgcacctgagatacatgaggccaagcatttcttagatacatactgtaccctcccttgctccatgcctgccctgctcctgctgcattctcagctccacctttcccaggctgaagtcttccttgcttgacacatttttctccaccactgttgggccactggccccttgctttttgtccttcagtcacactaagtgtcctggctttgttccagtccccatggtggagaacgttactttccatttgacatcttctcaataatttccctctgccgaggcagtggattgtctccagtttaaatggcctccatcttgttatgccatacggttcagtgactgtaaaacagttttataaagttgagtatccagttcctgtattgactgctgttgacccccagtgggagagaattcatgccatagtgcctggtgactaagtgtggattttgggaggtccttgtacaattgaataagcttccaaatacaatcctagcacactgctgccacatatgaatgcctgtaccctatactgttcttcctatggctcagggctatgcttggcacagtgctggtacccagagactgttatttgaaaaggaggaagtatgtgtgtttgtttatgtggggtcagggaaagagaaaatatacccaaacccttcattttggaatttgacagggctttagaatttattatcttcagtttctttatttttatcctctgatagaactgaggatcagtatggcggaggagagataacccagtcactaacgtacaagcttgaggagctgagtttatccttagaaccttcataaaagttttgagcatcatggagtggctttgtgattccagcatcacagcggtatccttgtggcttactgggaagccagcctagtctaattggtgaatcctatgctagagagagaacttgtttttaaagccatgatcaggaagcttgctggggttttcctctatacctaccatgcatgtatacacacaggcatgcacatgtatacgtgtacacatacatacggaaaaatcaaaatgtacagttctaaaataccaaccaagtatctttgcaatgccatacactgtcattctcaaaactaagtaaaccaagtgatttagctgaggttgatgtattagaagatttatagttggatatataaataaatctgctttaacaaggattgaaggtgatacttggttactccttttaagtgtttatgttgtctgctaagagatatttcctgtttctcttttatttttgtgatgtagttatttgtaaagaataaagctaaacaaacaaagcagcagcaacagcaacagcaaaggaagttattagtgtttgctctgtagcagaatggcctaaaatgtagtgcctcagatcagcaccttttcattcatgtaggggtcagcatgggttcacagtctgatgtgggtttgggtggatcatttttggattcctctgggttccatctagcttctacgtatatcctgttgtagatgtgtggctctaccaaagagccttgtgttgtggccaatgcttcagttaggtgactgattggtgtgtgacccacatggtctctaatccttcaataggctagtctagcctgtttttgtaggtcattgcccttgcagggagagaagatgcttcaaggccctagaaatagaaatgtcattccagcaagtcttcaatggtttttgatgtcaaacaagtcattcatacaggaaagtagtagatgccgtgtattcatgacaaggcttgcaaagatgtgttgtcgaaaggcatggatacactgtggggagtgctttgctagtagttacaaagtcacatttggaaacatcctttaaaaattgtctctgatcagtagagtatcttttgtattttaatgggctctttcagcaaggagagtacagttgcttccttcctcatctgaatcattgagacattgtaataccccaacgaggtaaatgtttcacttgtatacactcctttagagttcttccacagcagagaggtacagtctctgtccataccccagccttctgacacttgtctgatgccctcaaaggaacaagaagacccctctggggttgtagagaaataagctccatttttacccagcatcccccctatgacaactgtggaaactaggcagtgtctcggatctattgatgattaaggtggagcggggcatgggtaagaagacagagaaatgttaaatcacttatgagactattttagtcagctttctgtcactgtaacaaaagctgagacaatcaacttccagagggagaaggtctgggatagctccagagaagttgagaaattcaatccaatgatcaagcaaatgctttgctgttaggcatctggcagagagctgggtagctgtgaacctacatggtagggaacaccagtcatataatggatgaatagagaagggaactaatctttaaaacatgagcttttagggttagttacaaaccagactacgctagaagtataaactcccagcactcaggaggtggcggcaggagctttgtgagtttgaggcttaccttgctaccttgtcagagcctaaagcagaggagtagacaaagctgactcctgtaattgttacccatcttgtacctcatcatttcacctgctttgtcctctcctccaaaggtttggaagtattgtttgtttgtttgttttttccccagtgtgcactattcttcctttttttaagtctgttttaccaatgtggaaattactcaaaactcttaaaataagcgggagaaaatgggaattaaacctcaggactctgcactgtcgaaaactgattatgggaaaattcccacagtggaggtagaaaccattccacacctctggtagcctgggccacacaagcatttttctgagatgggaaacacatccatttgatcgagggtgagagcagtaggttttgtcagtgaagcgtgcgaaaggatcagtccttgctctgagctcatcttttttttgagctgagtatgctctgtgaagatgcagccatcagcgcatttatatctaactgagccaacagggcatgcagtgagagggaaggaaggcccttatctaggggatgtatattgggtagggagctactgagcgtgaaaagttcagttaatctccatctcttcactttacgctgtacaggattaggtcatggcctctgcctccgtaactgttcttttgtacagtgtcccatgtgaaatcatggactgggcaccctggttcaaaccctggcttgaacaccgtatgtgtctctgcagaaggctcttaaccaatctgtgctttggtttcctgtgcggtacaatgggaataacacttgccttcctaggagtcgtgtgaaatgcctggcccacatgtggcaagagctccattagctagctgctagtgtctgtcagtagaaattttattaatgtgaaatcgaattctaagaggtgaccagatatttttggcccatagcctacatttgtacctaatctgattgacacattggcactttgaaggaacgtcacagttagactgtgggtatattaacagctctgttaatttcatgataggtccttcccgggtccactcagattctaggaactccagaatactcatcgtggaacccaaagtgagataggactcagtacacaagactgaatgaaaatactatttggtcttaagccactgaggctcagggatggaagcctgaggaggggaatgtagtttgatctaaactgagtttccaggcacaatggccctaatagactgaaattatctacctcttaaaaacaggcatcaagtctcatctctctttggatatcagacgccaatctttcatattgtatttgtatttcatattgaaagaatgccattctggtattaattaagatagcttgaggcaattaatttgtggaactgatcttgtccctctgtaggtcaatttcagtgttccagctagctgctgtgggtgtctatgcacacatcctgcagagtagtgaaggacgctgatttgttccttttctggccagtgtgaccattccacttgggttctagggatcatctgcactgatttagcaagtaggaatcaactcttctattattaatggcttctcaatgtattctaaaactcatgtggaattttgagaggcactgacttatccctctagtgggcttgacagtgttgcccctgggttctgtggggcacccatgtgctgatcccagtttggttttaaagtgcctatccggtgcttctcactgctgttcataagatatacagatagagatgccggctccgatttagtcaggagcttcaggtgctgtcaggataaagagtgttgctggttgtgtgttttccctagaagattgccagtctatggtagtcgtatttggatcctataaaacacatgtaatgaaatttaaaagcaggtgcacacagggaaaagaattgaatgagtgatttggtataagtcacttttttcaaggtctaggtggttacattgggataggaaactcctgtaatgatttatttcaaatcaaatttaaagttttagatttatatggtcagacggagggaaaacaatatcatttcttgtaactttcaagaccagaaaattaaaagtttaaagacaataggctgcggagtagcttgcttttatttatttatttatttatttatttatttattttaacttggaatagaatatcacataaaaaaacacagtgtgtacagaaatttcaggtgacctttaatttctagctttacataagcataaacactctgaatcaaaaagactggttatataggaagttaatagagacggcccgagtttgttaggttgagacagtatggaattgccatctttacaggtcagaaatgatcaaatacaggctactttgtgaagtccaaaatattactattctgaaagagcagtatcgttactttctctaggttgatcgttctgtgttgaccactgaggtagagctggcccacccaggtgttgcaaacaggagtgcataggctgttatttatgtcagtggctgcactctgaaacatctgtgtttactgtgaaagtaatagacaacagagggcgtggggtttccaagagtctctcttagcttaactctcctctctcctctgtgagggcaacaaggactgtcacttatggtcagctttaggccgaaggtttgagataggacagttgacattatcttcctgcactttaattatcttattcatgagtttcattcattttgtcactttggagagaaactgatttaggtgtgtggttgtttttgtagcagaacatagctgaaagtaaagtttctaaggcctatgtctaaaacccgggctctgtcacttctgagatgtgtcatttgcggcatttggctcaacctctcttggcctcatatgtcacatattagaaaaaaataaaggatggttgagagaaaatgaattgtacagtatatgtgatcagtgtttatcatgttggatgcactgtgtgttcctttcaatttgtttttcattataattcatgcagttttgaaacctgaagatacaggccatctaaagaacacctctttgtcttttaaagggagagcaactgttgaattctctttactaaaagatgttcatctgaggagatattccattgccagtagaaagctgtagtgaaccgcaaagtggacatttcttcatcccaatatattttgcaaacactgcataaagaggtcaagtcgcccttgaacctttacctggctgggaactaccccacctgctactgccttttaacagtctagggtggtttctctgcaggtgtgtttttccctcaaggagcggtttggtgtacctttggtgtacctatgctacccatgctaatccaggctgtctagagctgggatgtgcttgctgtaggtcactcacagcttctgaacatctactgaatggcagtgctcgattttgtgtctcagccatcacaaggcaaacagaatgagtgggcagcctgctatggagtgccatgagtgtttgagacgaactagaaagggagctagaagggctgtgttatgcatggtcagggaagacatttgtgatgagctgacctctgagcagaggccatgggtgatggtgcttatggctatctagaggaagcaggctccaaacagagagttagcaagtgtgaaactggggtccttctgggtttttttgtttgtttggttggttttggtttctcagttccaggaatggtactcagtcccacatgtgtcctggcatggactgtaccactgtcctaccctaactccaacagctgagagggtttgaagaacagtagagcccagttgtctggaccaaagcaaacagggactggaagccatagcaggaggtaagcttagggagcacacaggaaggcaagaacaaacgatagtgaatatattaagtttaagcaggtaaagggtaagggctgggctttcactgaatcaaatttgaagaattataaagttttcaacaaaggtgtaccagaatggatttggattttacaaacaggatcattcaacggcatggtgtagactcatctctctattctgtgctgagtttagtgaccagactagaaagaatgaagtacctgtggatcctgggcatggactcagaagactccagaattctctcttatgtttggttcctaacttcatgaatgcatgtatgcgtgtgtatgtgtgtacttttgtgtgtgtgtgtgtgtgtgtgtgtgtgtgtgtgtgtgtgtgtgtgtaaatggtatagatgtggataaaggttataagagctagaaaggagaataaggggatataaaaggagatgttgagaagagagtgtagggagaagaatgtaggagacatgcaagtaaactagactaggatggaaggagaccaggtaatagaggagggtaaagatgaggtagggagaaagaaaatgcactgaaataaatgttattgaaaatgccataatgatttctgtctttatttggtaataaaaattaaaaataattttaaaaatgaaataaaaatttaaaaagaataaaaagaaagttggtagggtttcctggatgttggcaagaagaggcacattggtttgtagcattcagagatagaggaacaacctggagtcatctagtgtgtccccagtgagaagcatacccagacatctccaatattccacaccccttcctagctgcagcagaaggcacagagaacctcttcgctcctttgaatcttggaattagccctctggggtcatcatgatggaccagcaccacctgcagggctcactgaggagctcatttgacagtactgtggccatccaaagaggcacaatgcacattgtgagtgaggagctgacaactggatgtcacatcccaaaggaagcctaccataagaagcaccccaacatgggagttctctagtctttcaggcccaacctccctgacagtttcctggagaaagagagcctgtatctaggaactaggctctcacaactaaggagaaacattctacttcaacaaacgcttggcccagaaaacagtttttccctataggccagaggctccttatgtctggggtggtcagactaaatacactcctgtgccccagggaggacacaggttcttgtgggagtggccaagctgcttcatgtaggcaaagaggaccaagatataggaccaaaagctttgaaactcaagtttcttggaaggtcaactaagactcaaataacaaacctgagccaggatgatgatctactgaaatgaaagacttaaggagaataccagatcatccagtgtaatatgtgaagggtacaggaagcaaatgaaaattatctaaagctagaaacgttatgacttgagagagaaaagacagatgcccactcacttatcaaatgttggagttatctgacgagaactttaaagcagccatcataatcataacaacacaatgattggaattaaagcagaagtaagaaatctcaggaaaaacatacaagtctggaacaagaaacaaataaaaataataatctccccttcccacagacaaaaaaaaatattagtcaagtgcatagcacactgaatgagattagtaatagtctaagtcttaaaggacttaaatctcctgttatagatgagtacttatcactttagcagtaagcacaaggccattagcctggcccatatccatgagggaagatgaggctgtatcacttagctcctggcctttgacctcactgtgcattgctcgtacagacacatagacagttactatgtttcatttactgcaggatgagtggttaaccctatgttcttctgggattcagtccttgtttgtcatttaactatgtgactctcatttaaagttctcagagcatcattttcaaaacagaaacaaaatttgtgttcaagtcacaaaattgtttaaatgaaatgaacaattcacaaatgtatttcttagctgttaagtacaattttggttaatgtcaaaccttccacctttcaataaaactctatgtgtaagttttttttaattcacttaatctttctgttaatagcaagtacagcgaatacctggagcattttaatgttccactattcagggtgttaaactaattgaagcatggtttggaactcctggcaggtttatagaaaattaaaattaactagcttttttggctatatatatatatatatatatatatatatatgtgtgtgtattatgtatatatatatatatatatacatatacatgtgaacaggttttaaatggagttatgtaatgggagtggagagcaatgactcacctagattccaacattctcaaatacagagcctagtgacagccatgggttatttttcttggaacaggaactgggtggcacaggatgacttgtgttactctgtatggtctaccctcttctacttggcaagcctgagtttgttctctagaaagaaataggtctctatggaattaaacagcacatagaagagtgcatgaagtctcagtttggatatgataccttgttgcctccctcatacagctggcagaggcagtagtcagtgagtttctggccagtagtttactttagaaccccaaacatgacaggcttaaacgacatgatctaacataacatggtgttagtttccctcaagaccttgctagcagtaccctacccgattgctgaagacatcacacacttcattcataggatgtcaacaaaaaaagctggtacttactatgaagtttcctccctcctggctggtcttcatagtgctggaagatcctgtgttcactactggtaaaataactatcagccttacacagctgtgatccctatgtggcaaataacacttggcctggccagataatcacagtagtccaatagtggtacagatattataggactgaccaagagcagctactttttaattgtctttaaagcctgttccataagataaaactcatgcttgttactgttaataggatcaagaatttgagtctaggaaagtcataggtcctggaagagtacctgctactactgttttgctaaatggacacagtggtaaagtgactcctaatagtttctcattatacccatagactagtgcacctttcagccctcagcagtttgtttttgcactagtttccagttaatacaaagagccacaaattgtgaacatgtgagacttcagatgcccagccctacatggggcatctatggaatactcttcctctgaaggctcagagatcactatagaaaaggtgtataaagattgtaagagcaagaagtatcagatgagtacaaaaacattgttttctgggcacaacaggacatttgcacatatgaacttaacatcacctgtggcagcctgtgcaagagttgtacatgctcaaatcccagcatagagcaggtgaagagccatggagtcccacgcctatccaaggaactgttggtgattggtggctgctgggagaggggaattctgctttcttcaaggattgtgacccctgagaaactactcatgctccagcagatggccctacacccttgtaatactgtcagtgctaagtgaacttggtgggtttaaaaaaacacatgaaattgagaggggacagtgggggcagtaaaagactagaggaaatagagattaaacttcatcaaaaatattgaatataaatgaaattctcaacaaataggaaggatttaaaaatctaaagcagagacaatttgcaatgagctactttcagtttatgagttccagaatgccatttataaatgttaagtctttttaggtttatccgagtgtaagccaggtgtgctccagaagtaaaacttgccagctggaaaaggacttaagcaaaaaggtaatgggttgtgcgtcatcactgctcactggtccgtgtctttatgtgtcagtatgcaggtacctgcatggttctgaaacagaagtttcttgggctaagttttacttgcattcgggatcaccatgtcagcagctatgatttctaatactgatttttttttattgttagtgtacttgagatatgacttttacctgttgctattttgaaagaacaatggttctcttggtgtggttgtaacttccattcctttaagcagggcggtggtgacatgactttaatcccagcacttgggaggcagaggcaggtggatttctgagttcgaggccagcctagtctacagagtaagttctaggacagccagggttacacagagaaaccctgtctcaaaaaaaccaaagggaaaaaaaaagatcatttagaaacacaaatgtttctactttaaaatgatggctactccggcctagtaaacacagaagtggatgctcacagtcagctattggatggatcacagggtccccaatgcaggagctagagaaagtactcaaggagctaaagagatctgcaaccctataggtggaacaacaatatgaactaaccggtaccccccagagctcgtgtttctagctgcatatgtatcagaagatggccacccatcagtggaaagagaggcccattggtcgtgcaaactttatatgcttcagtacaggggaacgccagggccaagaagtgggagtaggtgggtaggggagtgggggggagggtatgggggacttttgggatagcattggaaaagtaaatgaggaaaatacataattaaaaaaatgatggctacttttgtagcaatgatggggaatcctaaatttttaataaagaaagtacaagtgattaaaatacacttcagacatttttccccaggaacacatactggaagttgtacagattatgatttcagaactcacctctgttctaagcatgcgagaagagagtctggaaggaggaatgctgtcagagtggcgagaatgtgtgccacgaagtcacctgaccaacactgtgagagttaacttactttggagtatgcataaaatcatttgcttttaaccttggtgggtggattccaggtagcactcttacagttggtaatttccaaaagctccctctagtacagtggttctgaacctttctaatgatgcaaccgtttaatacagttcaccatgttgtgcgactccccaaccataatattatttcattgttacttcataactgtaattttactactattatgaaacataatgtaagtatcttatatgcatgatatctgataggccacccttctgaaagggtccttcgacccgaaatgcaactggcagtttgagaactgtgactatagagatagtgagaatgagtctgaagaaactggattttttttttcagtaactgtgtaaccaaactttagcttgtgtccatatctaatttgtgctatgaaagatctagaaaatgcattggagagtgttctttcttactctcatctgcccctctttcactaaaggtattagctttaatagttttatatttgtaaagcgtctaccacgccatggtgctccctgtaataattcttgaagtggattaaaattaattgtcagaattccagcaatccaattaaagtggaaactgcagaaagctcttagatatgaaaaaataaaagaaacacaaatccattgctaacagttgagtacaaattgtaactacactgttcttccatttctaacatatcagtatcaaccactcaatagtttgatcatgtctcctaatgataaggctgaataaacagaccttatcatgcatacattttggggaaagtgcaatgatccctctattattatttggtaatatctaccagagctataaatatgtataggtttactcagcctcttctcgttgggctgttatatcctatgtgtttgtatatgtacaaaatgatgtatatattagctgagtctcagagctgctgtaatatcctatctcaaaaatgatgtaagtgcccatcagtgggtgcccagttgaataagttgtgagctgttcatacaaggaaagattttgaagatcgctcagagctgaatgaagaggctataagatctctctctgtagtgatgaacaaagacctgtacagtctatcagtcactagcatagtgttgtccagaaactgggtaataagaggaatgaataagaatagaatcatgtttgcataaacagcaagtacctctctcagggcatttaccttgtgtgtggaggaacagtaaaggaagataacatggccactgcacctctaaactctttccattcatttaccagtgaccatttctcacaagggaaggagaactaaaacatccaaatatttagttctacactttccactcatgactatttatgtttgattcacttttagttgctggattttgtcatctagttcttttgaaggatttatgaatattctgtttgttaaacttctggatgagggacaatatcataattctgtatatgattctcacttgaaaatctttaaaatgttgtaatgtttcttgtttctactttttgtctggagatttagtgaagagggcacaaaaaatagctcataccatgaatccttactccacaagttggcctgatttttaaggtaccttttaactttacagtattttcctgttgcttgctttagctccagctttctactatggagtatgtctagagagatatttttgactcctgattgatttgatttaaaagtttacttcattcacaaattactgaaaatgggtgattacttgaatgagtaaatgaagtaaatatctaaatgataagaaattttatggttcttttagtcacatatactacacatgagtttggtgtcattttcttagctctttgccatattctttttgctatttgaatttcttcttcttctttttcttcttcttcttcttcttcttcttcttcttcttcttcttcttcttcttcttcttcttcttcttctttaaagaggtcagctatttaatatctttgttttacattgactgtgatataaacttcatgtataacattttctttgtgccagagttatacacattttgcctatctgtgattttgctatcaatcacaatgctgaaaagatctgatgattgagagtcagtggggaatgtcatcagtttctctgtgtacctctgattgtccaaagcctctgagaagtggaagctctgatgggattaaatatgcaaagattttattattggaaatacttgtgtgatgaagaaaataattatgaaataggcagaaggagactgggaggtctctcaatttgagatataattttgagggagaactgataggttgattagagaaatctgaagcttttgttttgttttaagtgaaatcagctgtcagagtatcttatctcctaggcagagaccagtatgtacttttctgctgggatctatcactgactctgagcaccattgtaagtcttgacctcagcatgaatgtgatggtattctgacctcaatagcctgagcttttggtgagactcgttctctgcatagccctgtaataatgctcccttgcgaagtggatggcaaagtggatgctggaccttgtcactttgtattggttctcacatgacttcacccacccctgtgatatgcagtcactcacttttagtatgcagttctgatctcttatctaccatgctagccttatcttcctgttacttgtgaagccctttgctttgtaaccttatagagcttccgactctgtacctcaccatgagcatatcattcttctcccagccctgatcctacaatttatcttcgtcttagctcctcatgtcatcttccttgacatccccatattaaacctctggaattgtcttcttcctctcgggatacctcaacaggtaccatatcctttgggtatatctgtaattctgccctctttctatttcatcagtgaccattctaattaggttcacagttttctctttaatcacatattttatagtggcacaagacgttctcagtccactcttttggtgatggaagtggctggccagacaccgtttacttcatagagttcttatgattgatttttctccatagtccttggctttgatgcctgttaaaataaataccagtgtctgcaatagagaatgagtgtggtggtggcagtattcccacttctggctttcacatagctactatgaatgagagtttgaatatataattcaagtttcagactccagcagtgcctactgtatgtatagtggtagagaaagagttaaagtaaatagctaaactataaacaaatatggctactgtctagtgtgtgctgggttgatgatggtggtggttttcttatgccttataggcacattggaatgaaacatgataaaaaatttcataaagaagaaatgattattgaaccaagtagtttaagattcaacaatgatcagattgattaattttttattaattttttgcttaatgagtaaattatatctcctcttgtaggggaaataagtcctttgaaatgaggggcatgctggtttagtattttagtaatgattttactataaaggtatgggtgaacatcatgtttatgtgaatctgtactgaaattcatacattttattaaaatatgtactatgtttattttattcctattaggagatattccatttgcacatgtaaaaaacggacattttggaagcagagatgctgcacaagggaaatgaatccctttctactttgcaacaaaggttctggcaggcacagtctgatgttctcataggaagcccagtgaccttgtggatgaatggatttttcaatcacattgtaaagtttgccataatttgtcatccatatagtcttaagaagcagggttatgacaatatattgattctccatcccccacatcttatattacttccagtaagatttatctaagagctagatctctttcagcttgggagaacttgagtgccgacaacttccctcttccttgctatttgtcacatgcagagccactgaggaactcaagcactttggggatgctttgctcagaaaacaagttgcataagtatccaggagaagaatagtaggaagggtagttttaacagaatatttgttaatgttctattaggtcacaaggctgtgacttgagagcagctggcttgttgctagggtatcccgaattggtagtgaacaagcactctgcttgttcccttttctcaccgacagacacattaagacacagaaacaaagacctatagattctgtatacacttctagagtcagagttcttcagatcagatggcaggtgactccatttccctgtgtttttgaagcagcagacccctccccccttttttactagttgtacatatccccatgccttttccgggaagccttgttaattattaatcaggtcagtgtatgaacctcatgaaattctcagataaggactttcttgatatctctttttacactcactgttaaaagtatacagattagtgttatttttgcttgattatgtgaaactgttcagttctacacttgagaaaaatcctaactgttcccaaataccaatactcctgttttgaaacttgaaattctttccccttgccatcagagataagttatgcgttgtggttagtgagcttgatgcccacatgtaatcttgtgtttatgatggcagaatgaggtggggagtcagtttttttttttttttttgaatcctggttcttcaggtcggttggctactgagtttagaggctgaggcatctacaggcaacctgtaggtgcataatggttctgattgcgttttattcataacacccagattatttaccagcttaaagctggctatttaagggtgagcattaactctttagcagcactgggagctctttaataagtaactaaagacctggaggtgatctctatttttctaaatgcactggcttttattacaggtgcagttcactgaaggtcactcggtggtttcaaatatttaatgtccttttctaagagagtggccccaggccagtgaggaagctggatagaatgttatttgtcagtgccctgtgcctagcacactaagccaggtcgtagtagttgtgttctggcaaggaaagcaaattgacagatgtgactggagatagtaggagggccttggatgaaacacattaatgaggtaagagtatatgcatcagggcttccagctgaatatatttgtggcttttggggagtaatgttttattttgatgtaatttcaaacttaaaagaaaattaataagaccaaaacaaggaactgtacactgctgtatggggggagttgaaatgactaaagacaacattaagggcacatgaccagtaacatcacctcctgggaagattgagggctacgaaaagagctgtctgtcatccagggctcctaagtgttttgacataaaggcttccatgaggaaaaatgcagcattgcctgtctccttagatcagagacagaggttaggtgtgcatccctcctaatctacctgtggagatagtagagtagtgcacttctgtcagctacacggagcaaaaggcacatgaatgacagcaaaaggcacctgaatgaggattcagcaggtagggataggtagaaatgactcagatgtagaagaggcagagagaatgttcagagaaactgtagaagagaaagggcatatgttcagggcagaaggcagctcaacaatataatgggagtcagatggtgaaggtatgtgtaaaagactgtgagcttgttgcaagatcttatgaaaatggggcttgtttacaggaaatggtctaatatccacatagaaccagctgaccttaatggaaaaatactttctactgactatccagtatatctccagcattgctaagacatttgctgtgcatggtttttgatgttcaagtccagcccaggatttctgcctttgtatgtaatacttaggctatttttatataattagtggctaaaagacaacattcaaagtacagataactggtattctgatccatatatgttagacgagactgtggggaaaaatttgacaggggcgcgaattagatagataagccccgatggccacagccatggagtactatgcagctataaaaggaaattcacaggaagtagcagcgcagaagaatgatgcctctgggtactgatgtggaaatagctcctgggggagggggaagaggtaagaataatcttcttttgcacatttttgccttaaagaagctaggagatataaaaatgaataaaagtgttttgtggtgggtggaaactggcagatggagatgggtgggtgtgaaaaatcttcactggctaaataaaccttctttatactttttaaagtgtgttcatgtacaagttgatgaaaaatgtagaaaagacgactcttatgttctcataggaacctcaaggacagctatttttccacccccaaatacattatcttcatttctcatttaaatgggagcatttttctttagacatgaaaatgacattctccagcttcccttgcagtcttgtgcagctcctggaccaatgacacataagtggcatttggtgtcccttgatattttgccacagatttgatcaaccacagagtctttttgctttgctttcttcttcccaagtatggatgtccagagcctcagcagatgctatggaccaggagaatgcattgggctaagaggacagagcagaaagatggaaacatgaattctagtgctactgtgttgctaccacatatctgatttctgatttctctgacatgaaatggaaacagttctattgttgaggtggcacaattactttgatgtaattcatagcatttattagatattgggttctggtctagtattgtcccttaatttgaattttgtgtccttttgtgatcttatctcttttgtgaactttgctgcgacttagatttttctattacttcttcagatctttaggttgaagcagttgaagcctgagataagtattactgcagaatcatgagctatttcagcattcaaagtgccaaagttataaacattctcgttagtgtagcttgccatttttctttgataggtaaatgtttacaagtaaacagctaaatatttaaccccttagcacttgacagaaaccatatacatatgtcagaataagtgttcacaaatttaaagacatagaattgcatggatttcagaatgggcaaatgtcaacagtactaccacacttacaatttaggcaaaagcaagcctggtaaggactggggaaaaaatggcaacagtgatggagtttatgtcttagattgataggaggtattctgtggtcctggtggagagggataatgtattttcagctagcatatctattaatttgtttataatagactatagtaaataaatgttaatattctacgccaaaagacttagtaataaataaattcattttctcttgctgaaagatttgcactttcagtactagaagcaaaagggcattctaccattctatctgtgaccacgacagtgtctgtcttactgtccacatctcactagactagtcttgctcagggagcaacaatgcaggagcaacaaggagacaaagttgaggcatgtttcataacatctaaattctttgcaacctgcaatgacttctttcagcccccttatactaactcaatttgcatatccaatttagcaccttttctctgatttaagtagaaataatactcgactggaaaaaattgcataattattcaacattatgaagacgggcttttcccagatgttattagtagaaaaccttttcagaaaataaagaagaaagcattccaatggagaaaaaataaaagaggcttaaaagataaagcaataatttgtcattgtgttgctgagagggaaggtctgcctctgctgaaagttgctgtatcctccagattctttgaaactgatccccactgttgtggcatgtggacttggggcctttagaaggtgacaaggagtgttctgggtgggcccttgaaaaggaaattagcacctttaggaaagaatccacagcatcctccttgccacacaataaacagtaaaagatagccttctgggaggaagagtgtggtctccaactggcatggaatctgccaggtaacttgatttatatgtaaccatcctcagaactgagagaaataaaggtatgatttgtttttacaagccattccgactactctatttttgctttgaaagcacaaatggagtgaaacagatctctcccggtgatatagtaatgtcagcacatttgacacagaacagacatgccttttctatttcatgttttaagccatttgtttatttatacatacgttcttgggtaattgttcactgagcatctactttgtgctagacccatgcaactggagatagagtccccagtagcatagtactgagagtcttctgtggagtggaagagaaagtagactactctgaaagatagtatttcaaaagaaatctattgaggctgtgggtccagagaacctggagtcagtaggatctgagctctcagacagtttgagtgcagatgggaagtacattgagtcttgagtctgtgaatcacttgagcttggcaatgtgatagagctttccctgagaacacttagagggcaaaggcagtgaaaccagagtctaggacatgggacagtaaggttggaacagtgatgcaggagagaaagttcggcagtgcaggaacatatgtgaccagtataaagtgttcttccttatcttttttgataatttttggttgaaagctgattttattcaatattagaatggttactccagcttgtttcttgggaccatttgcttcgaaaattgttttccaaccttttactctgaggtagtgtctgtctttgacactgagatgcgtttcctgtatacagcaaaatactgggtcccattcacatattcagtgttagtctatgtctttttgagtccatagacgttaagagatattaaggacaagttcttaagatattaaggaacttttcttctataattttgttgaagatatttatttgcccttttagttgggaatcttcaccctcttttatacctattacccttagttttcatcttctcattgtgccctggatttcctggatgctttgggttaggagctttttgcagttttcattttcttcgattgttgtgtcaatgttttttatggtatcatctgcacccgagattctctcttctatatcttgaattctgttggtgatgcttgcatctgtgatcttttacctaggttttctaactccagggttgtcaccctttgtgatttctttattgtttctatttccatttttagatcttggatggttttgttaatttctttcatctgtttgattgtgttttcctataattctttaagggatttttgtgtttcttttttgagggcttctagctgtttatctgtgttctcctgtatttctttaagtgagttatgtatgttctttatggcatcatgagattttactttaaatccaaatcttgcttttccagtgtgatcttgtatccaggacttggtatggtggaaggattgggttctgatgatgccaaataaccttggtttctcttgcttatgatcttgtgcttgcctcctgccatttggttatctctagtgctacttacccttggtatatctgactggagcctgtccttcctgtgttcctagttgtatcagaactcctcagaatccagatgtctctgtgatcctgtgagtctggaatcctgtgatcctgagatcttggatgtgtcagagctcctgggtttcaagctgcctctgggaccctgagatcctggtgtggccaagctcctgggatccagggatcctaggcatgttggagcccttggaagtggagcttcctctgggtgttgtgggactggctctgatcctatgatcctggatgtgttaaagtacctgggaatggagcttcttctgggtgttttgggactggctttggagtttacctcaaggtctgctcagggcacaggcccagacgggaacttgtgccactgctcgggcagagttcctgggttcctggatcccattggtcccagttactccccagtgttggggcatatgttgtgtcctcctcatctctgatcctatcacagatgggtatttagaagttaattgtgatatttaataaacacaatcagacactgggcatttagtcatattgaggacttaaagtgagatatctaggtattttggttatgctatgaagatgtcaccttcagagacccactctaaatcattggcatatatttgcagggaatctgggagttatttaaactgcaagggaggattagaattgtaaaggattgcatggggcaggggtgggtggatcaacataaccttgacacttgcagttctgttctgtcctattctgttcatttctgggcatatggtaaaacaggaaagttaaaatctgtgtattaaagattgcatctgtgtaaggacagagcctggctgggttctctactaacagtttttgttagagaggaaatcttttttgcacctgaatattttccacaaataatgttaaataagttaataaaagttaaaatcattttacaacaaactccattgcaaatacaatttgagattttgctccaagagatacacacctgtgtggcttctttttcctagctaggacttatatctgtgtgcacacatgcttctgctggttttattttcttaggtgaggaatcttcatcgttcactcatccacgaagcttgctttaattgcagttgtcagagtacatgaatcatattttgataaggtatctgcactgtgccactgtgcctggtacccccagtaatgtgctgagcatcagagctgcagggcgagacatcgacagctaaacagcagctgttgcagtatctttatcacaacgcctctgaaggaagtgtcctcaagatgaaggaaaaatcatcacaattctggatagaatgaaactaagtttcaagagctgtatttagaaaataagtgatgtctgtgttttaggatgaaaacggacatagatgatttaagaaaaaaaaaagacaagaaagtctttatgtctcgacagcattaaatgtttcagtgtcacgggcataaaattggacagtaaggcagtatgtaaatatttatgtattaaattatgggaaataaaaagaaggcacacccaccatgatcataaacatgcaaagtgtaattgtttgtttatatagaactggaagggatattcagacatgaagccagctgtttcattagagttggttttaagttcccttctgctgctataatgatatttttgcaacatcttcaaaaacacagagaagacaaaattgattcttttatggaaaatgttaattatattgaaactgtggttataaatggaagactggtgttacattaactaataattacagtgggtatgtcgcaacagtctgtctagcttctgtcatgagcgatgctgaaattctctgtcgtgaaagatgctacagttctctcttgtgggcctgtcctctttaacttcaaaaggtgtgtggttcggtcaaccctgtccctctctgtagcatcattgagaagataggcttcatcccttatgcgacacaatgccagtttcaggtctgcacttacaaaactatagagaaagtctaagagaatctgtgagtcatccctttactatatatttactcttggtccaaaaacatactttatgtcacagtgacacattttatttcattataatatcaaattctccttttttttaatataaaatctagtgactgtcaccattcttcacctgtgttacaacttttaaactgaaatgattccaagcaggacatggagtcttgtctctccttacagactcatgggggtattttaatggtgacagaaggaagtcagtcccaaagcagcaacagtacttggaatgaatcattagcaactagatatttctttgttttgcttttcccacctgctctttttatcagagtcatgagatcctactctagaactcttagggtacagacctaaagaaatccatctttttggaacatggagctggaagcatgtaacgagagaatttgtttatcagttttgttgttgttgttttgtatagcccaggctctatgttcataatctcaaacctcctgcctcagtctcccaagtgctaggattatatgtatgtgttagcatacttggatagcaggtagaatgtttcctttgatgtgttatttttctagtggagtatttctttattcattttctttacaactaaactagattagatctcataaaaagctttgtaagaaggaggttgtcgatgcaagcattgacaagcagggagggaacagtcatttttcttatagcaataatgcagagaacacatgccttcattccgtcactaggatgttgcccttagagaggaaattctttgtttatgtagtactttcccaagttaattaaagggtttaacaggcatcatcccactaaacaaacagaagtctaataaaatgtaagctgtttaatatcattgcatctggatcataggtgacatatggctagctcctgactgtgacagtaggctttcagcccaaggaacttacgtgtactttttgatctgcacctccatatagagaataagaaatttgggaatcaaattattaagtccagaccaaattaatatttcacttactgtatgatgacaattaaaaatcatttaatagagatgtttcaactctttacgattatacatgtgagatacagaatatacattttactagtgaacttaatgttcataacccaaacactaggctagttaggcaaatgcagtagagaatggagggcaattgtgtgagggatactaaagcattgctcagcttttgtctgggtcttcacagtgggagctttggaccagacagtcgagatgatattaatgcgtttgtttctaaaaaaatgctttgctggcagttttctgtggagaggatgattaatcatgtcagagataacactaaagaatagctgtgagctgtaaggggcagctaccgggaccccaggatctcaggctgctcctctgattaaaacttggagggaaagagaaaggatacctctcacccctttcaagtaagaattgaggttacccaatgtgtttaaccttgggaattgtcaacagttgggaagaaactagtgtacatttttcagttcagtacccaagtgacttttccattagaagtgaaagtggaaacagcttctcttggcaaatgtagcatttgttctccaaggagttagctattgtcttcaaacaatgggcacatgtacagtgcaattaaggaacagcaaaggaggctgtaatcttatgataattttactgtggtatattacattgttttaaaaggttattttattctactacacgtacatttttttctctgtgttcttaaattacaaaagtggatcttgctcgatgaatgcatttgaggctgtccaatttcaatgctgtcttctctgttgggaaaaaaaaagaaccaaagaatccaaaaatgtacaaaatgaaagacgaggtctcctttccctgactcacctagaggtcttcactgcgaccagatatgatatgattttgtcataagttgatgtctgtccaaaccctgctgctataattttaagtcatttaatttatgggaaatgttcttggtataatctaattggcaaaaccaaagccttgtcctcactgtcagaaacagtccaatctcatttttacattagacagacgttagcatgatgctgttgggacaagaggcattgtgtttccctgtaaagatgaggctggcacccatgaaatgaaacacagctagctatcaaagaagcacctttcctagtaatcaaataggagagctgtacctatgttcccttaaactctccacttggctgcttctcttgggaaatgtcagtgtctttgagcactgctctagatgacttaagcagaaggagaaatgccagtgatgaacttgtccacatttgtgaatttgactcttcaggccccttatgcctaatcattaaaaaaattgaggatacaccttgacgtgcaattgggtgacatcttgataatccctttgtaaactgagaacctcacaagttggcaatgtgttaaataaactcaccatactgcaagccagcttggcttggcaacacagcacactgtgcagtgggggccctcttctctccccagaattgagaaagacgattggaggtccagggagggatgaagtctgaaacactgttttactgaacatatagcgctttcttactgttacagaaatgaaataattctaagtagaaccttattatagggccatccgtgttcaagtaaaaactgtagcaggtgtggctcaatctctaaatgtcttcacaatgtgtaagattgataactatgggttccatctctcacattacctcaatgatagagtgacattggatagagtgacatatttttttaatgtttggaatttcttagatcatttgaatcttagctttgtgttttacagtggaagctgtattcattcagtttcctaaggaaatctaaactgagtctttactaaattaggattagtacagattcctaaacttcttgagttatcaattttcctaaaatataccattcaaagcagttcattacctatcatgccatccttgataaaaataaaaacctgctttctaggtcaatcttcattaagctattaatatcctgttcacactgtagggggttttctttctcttatcagcattggcattgctgaagcatgtggatttcctttgttgaaccattgatgcttgacctccaatactagcagacttcatgccagcacatggaattctagacttaggtactgaagcatagttagacattttactttgagtgatagacttagctgttttctatgattgtttttcaattgtagtaacactgaagaccttgctcgaatagaacacttagaaaagtctgggattatgattattattattaattattataaagcagatacttctttagcatggatacacatacatacacacacacacacacacacacacacacacaaacacacacacacacacacacacacatttcccaaataacattcaaacaatttttactcagtggtaaaatgagaaaaatgagttgtgaaaacttcagataaatgaatggacttgtaaagagttatattgggtaggtgacccagtctcagaaagacaaaaattagatattttctttcatgtaggactctgacttttcatgtttatatggttgtaaataagggggtcatgagagagtgtctgactctgaaatgagatgggagactaagcgaagggaacaaagggaattgagaagagggggtgctcatggtgaagtatgtcttggaagtagagaggaggctattggggtgggaggaatatgatgggaaagaacggaagaagagagaaaaaccaagaacaaagtttgtttggaaaatgctgtactaaacccaattctctgaaagctaattaaaacttaataaataaataaatgaatatttacataaaatataaacacatccactttatcagcatgcagacatgcttgtttttaatcaatacactcatgtatatgctaaaataaaattaatgatttataaacaaataatgtgtaatgattctgcatctttttttttctaaatgaaactcatacccacaaactcaaatgtggtcctaaagtcctgttcactgggccaacagatccagccatgcagtgctatactttatctgtgtatcctctgaaagacacttgttatacttggaagttttggttgcttctgcatgtagaggctaccaaaggccatctgtgtattcacttgagaactcagagctggaagtgtttcatcagagtgtaagacctttaacctagtttacctttgatataatacaatggagacactttcatctttgtacatttagtgctgaaaaacaacattttattattcttgggtcccttattccacccatgttgtgaattatcacttcactaaagcccccttggatacccttgaaattgcatatcctgtttcctgctggaattcctggattcattgtcttagaagtgcatttatatattactaattcatgtaagatttgttctgtaggctgctataatactgagcctgaggctacagtggtgcacaaaagtactatctcatgtagcttaaggtttagttggtcagagactaaatgctcattagacaatagccagaaagcatgatgttctctagctgagcccaggagactccggcctgtgtacagaggaggaaacaaggtcccccgaggtttctgtgacagcagctttctgcaagggccacccaacatgtgatgatttgtgacatttcaacctttgtattcaaaggaatctgaagacaatgagtccctaaggcaggaggcagcaaaacaaactagaaaagccaggaggccatctatagtacagaatgaaggctggacaaagcttacaccagcctgccttgttacacagatttaatgatttctgagatgccgtggaacccggaggagagtctaagcaaaggtaacaacagggaaactggtggatgtgtatctgtcccatcaagactggattttctttaatacaaattaagaaaaatatgaaaaaaatatctttgcctttagatctcctttctctaacacctgttatgcatggagacagatcattgttcgtaattcttttggaggaaattttcttcaataatgaaggcatcttccagcactgnnnnnnnnnnnnnnnnnnnncagttttagcatttgtgaatgaagaataataagttcagcttagcaatagcttcattatttgatggtgctggctgtgtcttcattcaccctaaggctgctgcaatgtatttatattacatctcccccttgctttcttcccatatagtaatgctgtcttttatgtcagggtctcatgctagctcattcatttttggtgcaataaagccctctgatgtggcctttgggttgccctttaaacagttgtgtgattaggaaagtggtttgggctggtgtgctatttaactttttttttccactctctagtagagaaaggatgcaggtctcctgaatcattacttgggtgattgtaattttctgctcaaggaaggctgtctggagggtacccaatattaccaataagtccgagctaccctgaaaatggtacagatatgaaggatgctgcctgccatcctgtttctttgaatgcttctggcttaaagacatttttgccttctcggccgcacaggagcttctcaaggctgttttccatgctgggcagtgccagactgcggtgtttactctctgaattggaggccacttggaaaattacctttgttgtctcctggtcttctggaggatgccatcatgtattcctctccctctacactgtaaccaggaggcaggtcacaggttcccactataacttctcatttcttctgagtcggttggtgaagcttgaaagtccaggggcaaaaaatggagacaaactctgaatgccttgtagggaaagatgcttaaggaccacctttgtttcctgttgtactgagatgccagctggtagccaaccaggaggcaggataagtctaggtgaggtgacaagggacaggaattttcccttgacaaagcttagggttcactatccctgcccctcttggaataagaaagccagatgttaagcaataatgtggaattctccatcaacagtcctagtttgagggaaaggtaggtgtgtacatttgggtctgcctggaagccttgaagtcaatagaggttcaggactctctgcatttttgttttgtttttttgtttttttgtctttagggaacaggatctgagctttgactcaaaacctgcatgagtagatcattctcataaaaatggctgaaaaactttggaaagtgctcagataggaacaatatcaggcaattcattaattatatttgaatgttatgtgtgcatctgtatttaagggctttttaaattcacaggaaggagcatggtatacaccatgagtaatagacaaactttactcagagcacatttggaaacaccctacttctttatatttctttcacttaaaaaagctatttatgtgatttttgaggagtttgttagaattagatattttaagatccttttgacatttaacatggtgataggacatggggacataagttcaggaaaactggaaggctctcacagttgaagaaatgccatatttgggagtccttggcaaagtttgatgtaaactttgttttgtacttcggaaatctttataacagaattatgaacacccaccataccaaaggtttgtattcacaggacaaattaagcaaagactttcaacaatatggagttccaggttgaagaaaaaagtgagagctaaaattggatcaaaggtcattgtaggtctcaaactgaatcccaggctccggggtccactcctgaagctcaaaagaatctaataatgatctaaagggtcttgtttgttccatactattttgatgctcactgtgagggtcttccaaaaaaatacacaagggaccagtattgaatttatctttaaacataattccaagttaagctagaaagtgggtgatatttgtgtagctctagaaagctgatcataattcatagcatcactcagaaaggtcatttccgggtgagcgaaagatccccattctccaagaggtcagaataagggtctcgtgactgtttaaagataaactacagaaacacagagaccatgatgaatagcgaaagccaaaatccagagtccttgcctcactgcacatgaccataaggagagtttgctgccttctgaggctgtgtcaaaccttagtacccaaactgtagttgtggcacagggtcatagcacttgtctagtatgtgcaaggctgtgggcttaatccctgaactgatacaaaggaaaacaaagagccttcaagtactgtgtgcacgccttgttgaaggtgccatctttgggtgtcattcatagaacgcattctgttgtatatctgtgttttttatgtgttcatgtgtgtgcacacatctgggggtgattgagaacatttgttatcatggagcccaagattgataccacttatctttactctgttactgtccacttttttttttaaacacaggatttctcattaaagctgcagctcatcaatttggcaagactagttagccactgagctccgagaatccatccatctctgaccaaaaagggctagaatcacaggcgtgtaccacatgcttggttttatacatgggtgttgaggatcaaacacaggtcctcatgcttccatagcaagaagtactgcctgagctctttctctagttctcatattttcttaaaacaactggaatatttccatagcatgttacaattctgattgaagaatgtgtatgctgggtctaaatgtttttcagtatgtcaactcccagttagtgtatgcaaagtccagttagagtcccaggagatgtcagagttaaaggaaaggtgaccagattaattggcatgaatgaaaactcaagggaggataaagaaattgactcaagagggagagataggctgagaggagtacctgcttctcctgtggtgaagtgaagcaccactgagggctttccaagtgaagagaaagaggcttcgtgaagtgagatgacaggaaggctagggagaaattgctgggatttgtactcatgacctaaaacttcttaacgaggaactgaagagatctgtcaatagcaaaattcagagctgaggatcttgaggggagttaaaagtggatgcattcactatcaaagtgcattgttaatccattaaataccccagagtgtgcttattggtacacacagacagatcctcagctctgctttcatttgtgaggagctgagcataagtccctgctattccaaggctggagcatgggtgcacggcatccacatcttttgggagcatcttatagatggacctgtctgtgtgcattaaaggatgtatagttgagtgttgattctgcaaccagactgcattccccggtttcttccatttagccccgaggctttgggacagttttctttatgctctcaggttcctcttgagtgaactggaaataaaaaagtaatgatacctacttctcagagttattcttcaagtcaaatacttacagaataccttggtacacagcaaatcgtatctaagtattgataatagtaacagttggccagctagagccaatctagactgtcacaggaaacaggtgatgaatggccagttcccggcagggtcagttccaagccattgagtattctaagttccatggagcttgaggttggtccatgagttggctccatgtgtccatcatgtctcaaatttcttagcatgcattcatattgaaaaggaaacatttaaaataaccccaagttcatttcactctcactctattgttcatatatttagctgtctctgagttttaatatgcactagattttaggagtccagttgccttgtttgtaaaggtgacttttgctcagaaagttactgaaaactatttattgtgccagaattctagggatacatcaatgaggtttcgagtcacctctgtcagtgaggcttgctctctggatgtgaacatttgacagcttcatttcttctagagaaatttaaggccagacaaacatattgagatacatatgttgttggaataatttactttcctttgtttcattttcacaaatgctgttttcccccctttggggttgtaagattatatgagtgcatggataagttactgtattaacgatgcacttttatagtaggtagtagttattagagttctggctcatatagagaggacccattggcacaagcaaaggtcctagagcaggtattgatcacaggtgagaagcttggacagtcctgagtggttccttggctgctctgtagcaggaaggcagtacttaaatggtatacttaacttaccaaactctggcttattgagttatgatacatatatctttaaatctttttaagccaggcagaggttaatgttgtatggacagaattctctacactttaaacaacaattcaattttccatctttgccagtcttttttaattcttagaatgtaaagtaagaagatggctcattgactgcttctcacatgatagtgtcattatcagagagctggacaagaatctgaattaccatgtaataagtctgatacacatcaaaattataacacaaatcacacaatggagcttatagtacattgaaagttggttggaaattactttaagaggggtaattaatttttaatatctttattcacatgctaaatacaataataactagtacagaataaaacagcacacgcttgatgaatgcagagttcttctgttcaagggtagtaaatacaggtatgtacactgagccaaagtcatgtattctgatctctgattatttcagatgtggcattgccctgagttggataaatggtttttataaactcttggttttatcactgaaaacggaggagaataattcaggcctaaattatgtatagtgttgctcgaatgaaggaacctggatttgaaatccacaagtgctacccaaatacaagataaatagttttataaaaagtgttaagtctggtttgggtataaacaagtaagaattactcatactttaaggatataatggcttgaacagtgccttcttctaaattcatacctgcctagaactcaaaatgtaaccttatttagaaatacaggtttcatggatgctattagttaactgatacaaaattactggatttgattttgctttaaatctcatggctggtgttttcatatgagcagaagaggacatatagggaacacagcatatggaatgtgagaatggccttgcaggttggtgtggtgtggtgactggccaaggaatatgaagaattttgaggaagagacaaagtagcattttcccttagatccttgaaggggtaatgatgctgttgtgtgtctttcagttgagacttctatcctccagaactgtgagtaaatgcagtactcttgcgcatcttggtcagagtacaggaatttgcacctgtcatgatgatggtagccagagctactgagtgaagctttattggctttctgatagtctcatagtagatcatcactacccttctctcctcttcctgttcctcctcccccttttcttcttcctcttcccctcctcttcttccttctcacctcttctcttccttccacttaactgccacttgctagttcttactaagaatacacaaagtggaaagttgggaaaagtctgtaaaatccttgaaccttggtttatacctctgtatgtttcaaaataaagacaaacttgtacctgtctactgtcatagaaggctcaatcctggctctttgacctgcatttaaaatgaggatgagacacactcttatgaggctagtctgtcactggccttatgatcatgggctgggatctcttgctgaacatggatcactgaatggttctccatttggattgaaatggcaaagatcagcctaaatgtacttatggaatttgtattataagagaagatttgggtcagaggtgatattcaggagtttcagtacttaacaagatctgaaaatgtcacattccacacacatctacatagagatgtctcaagtgtctattggcctagtttcttagactgaattaaaaaaaatcaacattgggaaaattcaggttcaattttttgtaatcttccctcaatttattgccattttccaagacagcattaatactgaatcaagtcatatcagaatctatttgcctggttcttgctaattatatctcagcccaataagatgcttgttataattttgctttagatagtactgcatattacttttttaaaataggaaaatcatgtcttcagaacatgttactccatacattggctcttcatcttgaatattcatttcatttttcttcagccagtatagctttctgtatcttctgctgttgctcaggtctataaacaaaattttactttcattacatgattttctctgttcctggatttagaaatcttggatgacacatttccatcctttcaactctaaggaagtctgtctcccatgtgccttaatttttagtggacataatttatttcttccaactatgtttcaagacttccttggtctctgttgtcctgcacgtacactgtgatataaagattttattctattcaaactttccaagtctctatgtgaaaattgttgtctttcaatgatttgacaaaattgtagccatttcatgaagtatcttcttgtctcttaccaagattagagttatacacttagaagaatttgtacgtcttaatttatatttcttttttttaaaattaggtattttcctcatttaaatttccaatactatcccaaaagtcccccataccttcccccccccactcccctacccacccactcccactttttggccctggcattcccctggactggggcatataaagtttgcaagtccaatgggcctctctttgcagtgatggccaactaggccatcttttgatacatatgccgctagagtcaagagctccggggtactggttagttcataatgttgttccacctatagggttgcagatccctttagctccttgggtattttctctagctcctccattgggggccctgtgatccatccaatagctgactgtgagaatccacctctgtgtttgctaggccccggcatagtctcacaagagacagctatatcagggtcctttctaaagaacaatttttttcagtacatatctgaaacactgaagttagttacaagtggattgtccctctccatgttagcagtctctgagaaatttcccatctttctctatataccaccccccaccccctctgctaatgttttgttcaactagacaacaagtaaaggtgtgcaatctttatgttaacatgctgtgactatagcatttgattagttaaattaccattgtacccatgagtgacatacatgcctccatttatatgttggctattctaaatcaaacaacttggtccagttcccatgattggtaaacacttcacctttcctggagctcctggcagtgcctcttttaaatggaattccagttctgccctggcatcatgcgttttttacctgtgttccatgttaggacttggtcacatttctgtggcagagattgtaatacggtgcttctgaggtgtttcacccaataagctcccaactgctaagctttcttcaaacatttatgttgtctcacagttctactaggacaagctggaagacctctgcgtcccgcccgagcaaggccagtaagttggcaagctccttggaagcctgccatctggaggaacacccgtgtaaagtcctgcctgaaggcttggtagagtcccaacattgaccttttggtctttcttttctcttttctccccctccacttttttcctttcagaaaacagaagaatgtcttttttattgattgcaatgtctataaacttttgaaatttggcaattgagcattaaacttgttttaatgtgcacatttgcttttgttgaatgaagtccaggtctcttcatttcccagggcacaaaattcttggttaaattccatgggaaaggcttgtgttctgagtgtataaacatgtagccaaatacttgtagaattcagcaagtgtgtgcgttcttagtagtgactcaattcagatgcatgcctgtagaacctattcttcaggaaggtatattgtacaaacaggttttaaatggagtggacatccataacttgctacagtgaactcttcttcaatgattcaatatgctttcccctctagatggggaatcagcatgaccccttgaaatccttgcttctgaggcagtagttatattgtagagaacacaagaacgatagattcagcagatgaattaaagtgatagttatcatttgggaggtcagtggatttttttcaatgtagattgttgaatacagtttcagattgttgtcattttgagctattttggttagaaacaaacaccaaaaatttacacaaaacagtttgcttaatgcacaataaacatgtaacttaattggcacatttgttctttgcttgctttggaaatcattctggggaaacagaaacacctacataggcttctgagccacgtgggtgtagacctaattctttctgatcatcatggtagcatttggtaagtgacataactcctctgagccatggtgtcattttctatgagttggaaatgctaggagctatcttcaagggtgagctatagggttacccaatgcagtttgcttcccggtcttcaacaaataccttgatcttgagacaaaatatgatcaagaaaaggaagtgttcttccaagacatatgtttcgtggtgctgttgagatcaagactctattttaaaatgtttgtgttgtgaaacatagagcatgctcttagagctgacatcgtaaatgtgttatttaatgaattcagtaataaccaacacttagatatctgtgacatagcttggccatttgttcttaatgtacatatttaaaagcaaaagatctactaatgtaccattcaaaatatctttcaagttctacgcaagcctgccacatttttcagattaaggaatggaccacctttcgtcattgttcagccttattaaaatagaccactcttgatttggattgggtttgtcctgcctggtttggaattttacacacttgaaattataaatggtatattattgggttttttttggggggtggggtggaatctctggcttctgctttatattctatctcttttcaaaatctaatttgctgtagaaacatcaattgtatacaaagaacaaaaacaatgaacagtctcttctatatccctgaaaaaccacctttatctgagcagtactttgttttatttgaacacttgctggattcctaatcccaaatctctgatgactgtctctaagcatattggtgttacattcccaggaatgtcagtttgtgtctccttatgaacaggctccctctgtcccacttacaaacttaatgacaaatgctggctatcaatattgtcatagggaatggacatgccctaattttcttatttggattttagttgttttttccaacagggtatgaagagtattcatatactacagacagggatgctgtttgaagaagggtcatgctatgtgacccagcttgtttatgtatccccagagtggctatgacctcatgatcctcctgcttcaatctcatgagacctgggatcacagacataaaataccatgcctggcttggatgctttcttttaaactctaatttgcatagttgggcactatgctctacttccactgaatatttcatggtattacatgttccttatgcctctcacgaagagagtagatttatacattttcaaattacagctgctattggggttcataatatcttcagatattaaaaaatgtgatagcttttaattacttcatagcttgtatcttacatacttcaaatcctttctgtgcttcagggatggacttctggcatgctcaaatacacacacacacacacacacacacacacacacatatatatatatatatatatatatataatttttttctgttggtattacaaagcccacactttgctacttggctcctttgatttaagtgtgaagtgacaagcacagtgggctagcttagctcagcttgactgaacacagtcaccaccgagacctgagaaagttccttgaaggaagcggtattgagaacggcaatattttcatgaacctcttgtctcacatctgcctgggcgacttggaaggagtattctgaaggatataccactccgacggacacattgggtgcttgcttaaatgagtttctttcacactttcccttactttcaagcagtccagttactaataaagcagtgcccgaggttcccaataaacctgtctcatagtcttttcgagcctaatgcttctgtttctttacctctcacctgtactagggttttcctctccatgccgctcatgacaaagtgattcctggtgcaccgtgatttacattcttgttctagtaccgatcactggctaattgatgaacttcttttccactgatactaaagccacatcttccgagatccttgaggtatatgttttggtcattgtgacaccttatgggtggtgtcactgtagtctcttgtcacaagctctcttctcactgtgacccagaactttgaagtgctactgcatagattcccttggctttcatgctgccctggcatcctgctctatgctgcctgtggtatgctggattgtttggcctcagcctggtcccatttccccttggacattctgttgtgtctgtgcatgttgtacacagtagtgggggagggagaacttacactatgcacacagggagaagcaggctccagtaaaaaaaaatcagaatctttaaacaatataggcacttgctccatatcttctgggtttttcagtttgagggtaccaggaccctttgatcttgatccttttgtgacatagccttcctccttctccttgggttattttagccttctaggatatggcttttttttaatttctttttttcctgtacatagggaatgttaaattttctactaatcaaattaaggaaagacaagagcaattgaaacataattaaagtatttttgtagcctaacacttctaatatattatttcaacatgcacaggatataaggatgattaggtgttttcgattctgttttagtttgcttttctgttgttgtaataaagcatgttgaccaaaagcagtttaggggaagaaagggcttgtttcgcttacaagtccaaatcgcagtccactgtggaaagctgccggcgcaagggctaaagcaagaactctcgctgaagcagaaaccacaccagggaagtgtgctgtcattgacctataactacagccctgaaataacttttttatttattgttatttctggtaacaattgtcccattttattattaccattatcatggaaagttataaggtcattttcatgcatgtgtataatgtatttttaacatatcttacccaaaccccaatgttcttcccattcttaacctccaaaatgacattactttttatggctaatgttttcaatgtgtgtataaatcctattttctttatccattcccttgttgttagatatcttgaagaaggtatatcaagctgactttccctgaaataacactccccccattagttccacaacctggctattattatgaatgaggcttcaataactatccatatgcaagacctttgtagggctgacttcgagtatttggaatatgtactgagaagtagtatgatctgacatgttttatttgttttgttgttgttgttatttttgcaatctcctaactgatttctatacatcctgaactagtttatatttacactcgtagcatataagatgttcccttttatttgcaacctcagcagcatttgttgatccttgtttcttgacgattgacctcatgaccataaacgttcagggaggaaaggcttcatttaccgacccttccttccatttcacagtacatcaataaaggcagtcagggcaggaacctggaggcaggaaatgaagcaaggccccggaggagtagagataactgggttttttttttttctctatggctcactcaacctgcttgcttatagcacccagaaccactcacctaggggtggcatgtcacagagtgagctggcttgtggcatatcagtcatcaatcaagattatgtcccccaggcttccttgctcactggctagtctggtggggaaaatgttctcagttgggattcccaaatgattcttgcttgtgtcaagttgacacactgctttttatttttatttttttatttttatctttttaggatgctattagaaaacaagttcctcatacttcttaatttgaaagtaggacagtaagatgtttgtccttcatgtttgctgtcatttctgctcaagtgctcttgacgggtttccgcatgcctcgctctcctcaccaggatattccattcttttgttttgaaatggctaggagatgtttatgctccccatcctgcttttcatagttctttttcaaagccctgttagagtctggtacactgttgatcccacagccatgatctggtaccattcaaatagctgatgccgacatctatgagtaattatgctatagtctgggctgtgtatggtctatgttgatggtagccttgcttatcctttagaaaagtattccaaaatgcaattaataaataaaccaaagactacacataatgtgttttactcttactatacattttagcaaaagtagaatgcaattttttgcaccttcagagaaacactgtagaatttctctttgagtattcgaactaccagcttggttatgctaatacttttaagctagtacttagtaaactgagggtcatttgaacacagccattgctatactggaagaattgatctggtgagacaactcctacctaatgctgagggtaaaatattcagttacgtatgatgagcaaaaggatagttatcttttttgacaatacctagtgtgaggttacaagatttcattgcatgactagaattttaaaactgaatttattgacttttggtttttcaatttttgagcaggggcctaacatagttgagattgacttcagattaatatgtagctgatcatggtcttgaacttcccatttacaagcatctgcctccaagtgctaggattgcagatgtgtattactatatccatgttacaacttgctttttttttctggaattctccatttactgttttttaaaggcaattcactatagtgactgagacgatggaaaaagaaaccataaataaatgagaattttgtgcatctcatcccgaaaagcttagattggcatccttctctagaaagtgcttgccatggggatgtcaaccttgtagtgtgggatgctgagttcagttccctttataattcaatcaacctgttgattagttcaatggatggaagagtgactaccaactaccagatcacctggtatatgagccttgtggaaggcattggttcactatcaccaggtatttaccagataccaccttagagatatccctatggaaacagatataactccatggtcttgaagatggacagaccatttaacgggaggaaggagaaccaacaccctagggtagtgcaggaggatacacagagtgacagggtgacacattcaggaggcaggaggaggcagaatggtgaggaaaataatagaacaaaactgttgagtctttgtgtcaactgaaatgtcttgcaatgcttatgtgagggggacatataaccaagatacaacctttttaagcaggtgcttagctgagcggattcttttttcctttctttaaaaaatgtaacctgaagctaggacagtaactttttatagagcaagaaaatacagttagaaagtggacaagtactgataaaaactattattctacaagtactgccacgtaaccagcacacatagactgagaaatggaacaattcacagctctccaaccacactgtccttcttcctagcagatgtcacttctcctcctgagggcagcctctggattctaaacagacagattagttgacatttgggcaatctatgtcaatggaaactcacagcttactctatttggttgtatctggttttctgtctgtcactcactatgtcatttgtaagatttattcacaatgccccaagctttgtaattcttgttattgtataatgttctgcattgtgcatcttacatttatttatctattccatcactgtaggcactaggacagcttctcaatcgaggtcattattaacagcatttccacccatatcccatgctcactttttcttgtgcatctgtaaacacatccgccttggagtggaactgctgagaggcaggcgctacacacttgaatataaagtaggaaagggttatgcacagtcagcttacaccacaaggagagctggctcagcatacatccggtaaaagagtgtctgtgttcagcttttaaagatgaagcagtttttcaatgtggttttatcccagtctttttgtgaaatatgcaagaattatataggaagttgaaataataataatgatactactaataatagcaacaataatgatgatgatgggaaagtagaaagcagtgttctccagatgtgctgggcagtgatcagaactggttgttatggtgggcatggattcacaagcctggcaggcacttgccctgcttgttcctgtctgaattttccagtcactgatggaatgtaacagtctcccctttttgaactctttcttgacaccataccacattaagggttagctgcaaaattccacattctgctaaataccattcttaagactgtatgggattgttaaagacgtgaccgtgggtccaagcacggtcgctgaaggagcaagtgtgcatgggactctttgtttgaatccagacttctgtcctccattgtcttgacattgtagatctggcagcggctgataaattgttgtggagtagaagctttctagattaaaaacagcattttactaaaaatagaccttggggttgcttatcagtgctgaggagacaatgtgagggaaagttggctctgctgttctttagttttttaagccatgaagttaagcaccaggcacaacatagcagactggctgcactcctttgtttatgcttttatgcagagactttgttttcaaagactatgggagaagcttagtgtgtgtgtgtgtgtgtgtgtgtgtgtgtgtgtgtgttttctgaattatgtcataaataaacatgtcctttctgctaacagtattctggtcagacaaatttgcatattttcttctttgggttaggctgttgtttatatatatatatatatataacatatatatatatatacatatacatatatatgtatatatatatatatatatatatatatatatatatatatatatatatgtgacttttctgttttctttggggttttgtttgcatgcttgtttgtttaattgtttgagacagggtttctctgtgtagccctggctgtccctggaactcaccgtatagagcatgctaacctcgaacttacagagatctgcctgtctttgcctcataagtgctgggattaaaggcatgtgccatcactgcctggcttattgaaatttttaaaaatatactctctatatggttttgttaaaaaggtcatgtcttgaaagcatgtgaccttgttccaatcatatagaaataaataaaaatataaatgtggcaattgatgacattacagctcctttgcctaataagttctgtttctaaactgagcttcagaatttttctgctaggtggttaacactgaagtggacaacagataaaatcaagtatattaaaaatccaacataacagagacaatccttaaatgcattttaatattagaaaacatatctttacagctattatctctgcaggtaaaaggaggcaaatcacatgatcattttcataaggtcacagagaatgatagtgctctattcatgatttttaaaaagatctcataaacttaggagtattagaaactatctcaaagcagcagtcagggtcctgagtgctggttgcgctttgggcgttctgataagtggaaatggaaccagagtgttctacaagtctgtggcagaacattgtggtaagcaccataaacactaggaaaaagaagaccatgtcaacatttgccaggagcaacagtctaccttgggaaaacaaatgaattaaaaattctcatgaggactttagtaaggaggtgtgggttatgaaaaaaatttagtggatgactcctgtgacttgatcacattgcacccatttcaatccccacactgtaccccagaaacatgtataaagaaagcagtagtaattaaaacaaatctgaggagaaaagttagaaaacattccaacctcctctaccaatataaaaatgcacattaaagtaaaacccaatatataaactccaaatattcataatgttctgaaatattttcaaggtgatccaacatagaactaaaccacttgagcagtggattattcaggaagaggctgagtgcccaaagggagagctgggtacacttggtagcattacttaaacatgcttctacagagactagtttataatttaaaaggcaaagtggaaagctttaggcttgatcatctctgtctgcccatctctatctatattctatatgtttgtctgcctatctatctatctatctatctatctggcaaaccaaactcagagacatttcaaaggtttgaatcctcattctgaaattcttttttttaataaggaaatgtatattaaaactaagaaaatggataaaggattataaggagcagttaacaaagatgaaaagaaagacgtaaacctcactagctttaaaattaaccaaaaatatgcatatccaaaccaaggacatacaaaaataatcttcacatataattaaaaaaaaatcctaagagtcagtgattggtaattacactgtgtttgatgcttggtaatcccctatgcagcggttggtgataacactctgcagtgccacccgatatcactctaagtttgttattgtgcaggttgattagatttgtttgcttttttaatagtctttgacaaatttatcaaaatataaaagccttcaaggccttcagaacaattttactattaatattttattctaagaaaatgattgtgaaatcgatcagatattttaatgaggttctttgtaaaactgatgaacattataacaaattggaggccagtgaaatgcctcagagatcagcagtttctgcaatcaagtctgagagtctatgctcacatccctcggatgcacatgatggccagagagaactgacgcgtgcaagttgtgctgccactttcacctgtggcctgtgttattgacatgtgtgtgcacacacatacaaacacacacaataaatagcatgtgacaaaatattaaggagtactagtggtatgtctataaatttctcaaagtcaagaaattagctaaattatgatgatattttgctggcattaaataaatgttctctagttgaataatacataaaatgtagacacttcctgtacccctgtactggctagttttgtgtcaacttgacacagctggagttatcacagagaaaggagcttcagttgaagaaatgcctccacgaggtccaactgtaaggcattttctcaattagtgatcaaggggaaaaggccctttgtgggtgggaccatctctgggttggtagtcttgggttctatagagagcaggctgagcaagccaagggaggcaagccagtaaagaacatccctccatggcctctgcatcagctcctgcttcctgacctgcttgagttccagtcctgacttccttggtgatgaacagcagtatggaagtgtaagctgaatagaccctttcctccccaagtgcttcttggtcctgatgtttgtgcaggaatagaagccctgactaagacactcccattgttcagaaaggtattcagactggaaaggaagatgagctagatcctttgtgacagttcgagatgcccagaaactatattgataggaatccagctgctagtagtctcctctgggtgggagagtatgcttgattataacttactcatttattcacatttacaactcctcagatgagaataaataacattgattgcttatcaggataaagtcaaatgttttttttcattttgtatgaagcatgctttgtactctaacagcagaaatgggatgacagggctattttctacctcggagtttaaaggaggcatctctggttagtggcttctttattgctagtaaattagataatcaacttctgcccttgatctgatggagacacaaatagaacctgtaatataatcagacaccaaccatggcattaattagctaaccaattatataaatctgatctcagtttcaatcaccataccttttaaaaaatgttgaaaggccatccagaaactgccccacctggggatccatcccatatacagcaaccaaacccagacactatggcagatgcaaagaagtgcttgcctacaggagcctgatatagttttctcctgagaaactgtgccagaacctgacaaatacagaggcagatgtttgcagccaaccattgaactgagcacagggtccccactggaggagttagagaaagtactgaaggagttgaagacatttggaaccccataggaagaacaacagtatcacccaaccagatacccccagagctcccagagactaaactgccaaccaaggagtacacatggagggacccatggttccagctgcatatgtagcagaggatggccttgtaaggcatcaattggaggcccttggtcctgtgaaggctcaatgccccactgtaggggaatggtagggcagggaggcaggagtgggtgagtgggtgaggaaatggaaacaccctcaacagaagcagggggagggggtataggatagatggtttccgggggtggggaggaacccgggaaaggggataacattttgaaatgtaaacaaagaaaatatccaataaaaaatccattaaaaatttaaaaataaaataaaataactttaaaaaatcccaaaatataaaagagacaatccttttaaggaaagacttagactacaaaagataaaatagaacctggaatacagtttggaattaaattactgacatcttctttaaaggtatgtattattttgggttcgaaatgaaatgatttgaagactacacagaatttctcccatggaagctgtgtggtcaggttccaggtgtgataggtagtaggccattaagtgaaagaatttgccccgtggaccatagtagaaagaaaagtttatttaatgtattttgtccagatcaaaagctagggagaagcagaaagctagtctaagatatgggctgtggtgtctcccttgttcaacagacatgatttggctagggggacacaactaagtagcaccttctgtttcattcagttcttctttcgaatatactaagagttctgattgctatgggcttggtttggggcagcaacccagcatacaggaaggctactctatggtacagggttatggataatgttgatggttctgtcatttgcagtttggggtgttgtagagttccctgctaagaaactgttctcttcctcttctctctgtcattctctctcttcatgctccccacatcccatcttcaacaacaagcacagttctgagatgttgactgaagatctctttttccatagtatttgaagctgagtggggtggcatatgggctatacctattgttcattaccctggcaagggtataatgcagtaccacacacaaaaagaaggaaccgtatgtaaaggaagttttggtaaaaggtcacatagcctggctcaggactcttaatggaagtgaagcttcagtagtgaaggttgaaagtcttccaaaggaggaactgttacaaacaatgtcaaaatatccacacgtccttgtatgggtatactcgttgtgctttacacccacagagaaaatacatgcatttttacattttaacgagcattgtccagttttgtccaacagggctgtaccagtcatctctcagcctagaaacttaagtaacttttaggaataagaagggcaaaaccagacatatactttgctaaaaattataaatatttaacagttctggctattgtatatgctttaataattctgttattattcaacgtttataaaagaaaaaaatgaatacatattgtaggtaccacacaaatttgctttatactttttactattttgtaaatatttttatttaatattcatacactcatatagtacatttgaatcaaatccattccctcttctctaccctccagtttgtcccctatctgctctatcactttcccctaccaaacatctgtgctttctctctctctttttaaaaataatacccacaggtttaatttatcgacagtgcctaggtgtgcagaggcatgggaccatcaactagagcatgggtagtctgacaggcctgcattcttgaagaagactgacacttcattccagtcatcagtttttttaatagctccttggttgggatagaactttatgaatcctccttgattcatgctgggattttggctggctcgatcttgtgcaagtcttatgtatgcagtctatgcttctgggagttcaggtgtgcagctgtgctgctctgtctatcaaacattgtttcactatctgttccttctagctcccataatctctctgcacccctattggtaatgatctcagagccattaagggaaaggcatgtgatatatatacatatatacacacacattatatacattatatatacacacatatatatgcattatacatacccatatgtatatattacacacacacacacacacacacacacacacacacatacatatacctcacatttagagctgagtacttcttcatagtttcttattctctgaatattggctggttatgagtctccatgttctccatgttaagtatcattgacccaaaaaggagcatctctgatgaatgttgagagatgcactcatctgtgggtataaagaaaaagatgtagaggttaatttattatgtccatttataagaataatatattcttcctcagggaaccttagcaggcaatgagtgtttagatcagttaatggtgcccaagacagattgtattatgcagaccgtgcattaaatccaagttttcaaaggtggttgtttattcccatatcatttatgacacaatactacaagtgggcatatcgtgcaaggctagaagttgttatagcctgaagagttcacagttggataagactgttggtgactcccttcctacccaggcactgtatatataaactttctagaactatgaaatctaacctataggttgaaacttccaggtggttgtcaacctgatgtcattatgtgctataaatcaggtatgtggtatttggagcaatggggtcttactatcaaattttggaggaacaaagaagaatatgtagagggaccccaagactaagaactagataagaagtaacccatcctggaactgtgatttttagagaagccagtccaataaaaaacagagatagaattgctgaagaaagcccaatgcagaaatcaaaaataaagtaattaaatacaaaactcagtggaaagcctcactaatagaatggagcatatagaaagtatcatccgggatggaaagataagatagaggaattgaagaatgcagtaaaggccaatgatgaatttaaaaagaagtatgaatagagtgggagggctctggggcaccatgaaaagacccaggttttagattaggacagagaagatgaacaccgtagtgaaagcatagagaatattataaaaagaacagcacagagaatatcatcaatagaattataggagaaattcctcactccagcaaagatgcccatctaagtccaggaggcctacagaacattttaaactagttttaacaaccagttctgttttgtcatttaaaccaatgagttgtgagagcaaaactgtcgttattaaacagggagttagaggagacttttgtgagtacaagattgcctggtttaagttacttctctgggttgcatgagcctgttttccaacgtctgctaatgtgttcattgtcgtatatttcttaaggaagttgaagttttcctgtttgggaaatttcacttttataaacttatcaacataatcatctttgtttcttcatttgatattgttgcaatataaaaataaagcaaccatgcaccatggatttattcaaacaagaaaagcaatgtatttgaaaaactaagcctttgcttcccagaaaaagcaattttaattacaacttttcctctccctaaatcccatgtcctggggcagtttgcttcttagttgatgatatgacttatcatatagctaactgctttgctagattggtgcaggggctgtgaaagctcttgacctggaagaatacatcactaagacttcctggtttgaggagaatgagacccaatgacaggtatgttttattaaaacagcaaatctttattgctacccagtgtcagtttgatgttgaaacaaaattctataggaataaaaagacaagaagtacaatgaaatatcactgtgctcttgtgaaggcaaggagctgggacaggaattttcatatattccttagaacttcaggaccagtctatgtgatatctttcatttctcttgatttctgtatcagcaaatggaagcagagtgtggtaacacatgcaatgtacacagagcttcatcactttctgtctacctttggtaacccgtctcaaaccttagaaaagctatagcaaacagcacctcctggaagaacagaatttgagtcaagtcctaaaaagaaacgatttaccataaagagcaaattgagactagcatttatagaggggaagagtctgtgtagagccattccaatgaagacagtcatggaggtcaagtgtgatataatcagatttacctagaaagtagctccatttctgaccatgttgaactggctttagatgatgtaattgtgtcagataaaggattttagtaagaaatttaatagaatatcagggagaatagcaggcagattttgggaacacaaaactcagataacacctgtgtctctggaaaactagtatctcccctcaactccacttcatctacctcatcagtatgtttacatctgacagaagagtctagtttttggctacctcaatcacaacaaaggtgtactaccagtaagctcaacaccaggctccatggtcatgggttcatccctgtcctagttatcagtggtaaagaattggcttccagaactccttactgttgccacagagctgttggctcagacagcttcaagaaagctttgattgacatttgggccatgatgaacaagtaagaggttagtgtgtttaagcgttctcatgaactatgttgaaggccttgctcttgattctcacattggatggagaacggttgcaagggaaaaaagtttggtataacatgattcgcaaagatgggtacactgagaagcaaaggtcaattaaggaaaaaaatggcagtagcatgagcaagggcctgaagcatagcctccagagagatgggagaggctggagtttgctgagaagatcaggagtctgcctgaaagaaggaaaagcagagtgtatcggctgagcataaggaaaagggagctgacagctccaggaacaaggcaagcctgtgcattcttagtaggtggagaaataggaactggagaggcaagaggaggaggaagatgctcaggaccgtgggatgcatctggtttgaatgccgctgactagggctcagctgtcatatggaagtgttggcttagaagctgtaagtgaaatgttagagtcaattatgcaagatatgaagcctgtcacctatacattaagaaaacaaggctgctgatacttaggaggaaaatggaatccagtggccaataatcatatatctgaatttgcattactgtgggaaatacttctttttcagtgtttgtgaaactaaaataaaataaaatcactgaacttacaggcggttaaggcaggttatcatgtgatagatgacctaaacattgatatgatctacataagtttgggttttcatgagacacagtgatcataggcgaaatattttggtagaaaactctagaagcaagcaaggcatgcctgttgataagagaagattgatgctggatattgttctgaagcctgagtgcagctgatggccagagatgcccaagtgtggcttacatgacaaatggaaagagggaaaagttaaaatttcaaaagctggacagagtaattctcccagctgcacttattgccagggcctcaccatcatctaatgcaggcgccgcagatctgaaagaatggttgtgttttggccagaccatgagcttcttcttgagtccctgacagttcctggtagaagccaggaaatatatttttaggtttctatgattctggctaagggaattatgtacctcctgatggtggtcatccagtggatataaatagaacctttaaagagacaagctatgtatttcatgtggctattttacttagctccagatcttatttacaactgtcagaatttctgaaaatgtctctgctttattcctttaggataagtagtggtcacagggatgatttggaatttagctactcaataggaactagtaatacttattcttcaaagcttgtgataggtttaaatgctgaaagctaacagtgattgttcttttctcttctctttagagttcaaaacaaatactaggcaactctcagaataagccatgcaattactaatgcatttacacagcagcatttcagtctgtctgtctgtctattcacttacttggattgattgaagacaactaaatgtaattttctactttcaaagaattgaaagaactggttttcactaattaaattactatgactagttaaaaggattatatttttgtatcagagaatttaatagtaaaactcagcatatttctaaagatgtatattttatgtacatataaaaatgtacttattacatggccttagaaaaagctcacagtatcaagtttgaggaaaagataactggaattcccatgggttgctgggggactttggaaaactgttaaagttgtatctgtgtatattgtgtcatactgtatcataccatatatcatcccacaccataccatataacactgtatcatattataccatataatatcctttaaacctaatagaaatgtatatatttggtcatcaaaagacagttgcaagaattattatatagcatcataataatagtccccaccacaactcagttgtccaccaacagtgtaaagaaacaaactgaagcatattcccaatgcaagtaccactcagctgtgaagcagagagaactagtaattcatgttgccatatggccaaaatcccataacaccatattgaatggaagaaatcagacagaaactggaagtttgtttctaatgtgaaggtcaaaaaggcaaaactgatcaagctggctgaacttcagaatagctcactcttccaagggtgggttgttacaaaatttatataccatgtgatattgcctcttacctgcgatatactctctactggtccttttatgtgagtatccgctggtaataggagcactagcagttttcaggaaagtgagtaattatattgtcaatcataagcaatagtaaaatttgaaaactaaatgagatgtgtatcagataactatttttacatgtctaagaaattatcctaaattacagtagctttaaattgcaatcctgtatttaggctgtaattctgtgtatcagcagtctatctgccttcagctggtggttcgtctgtctgctcaaggatcattttcaactggctgctgagtcagcagagctgtgctgatgagccgattaactcttgttggctgggatgagagagaattgattgcaggttctggtctccctgggttcttttatacaagagtttgtggagtggtttcaagcaaagaagtagagaaacaaacagttgttgagggctgccattacaactagtgtggcctctggcactttctcttactcagaacaagttattaggttggtttggatttaaccacttaaaggaaaccgctgctaagtcactacttgaaaagcaaaggagatggtggcaaacactggttgcctttgcactcaggatgacaagcagagacaaattaatctctcatgactttatttaacttacctgataaggtttggacagtgatagtactgtggattagtgtctccagtgtatttcttggttagtttgtaaacactagcccatttcttagggatttcctaactgagctgctattttacttgctctggatgtctaagctcaagcagatttctctagagctatgatcatcctcttgaagtccttctgctatgatttaagcctttttccctcaggaagctaaaggacagtacattatactgtggcttttcaaagcagcatacccagtgacttacacagacaaagtgtctatccagcttctaactcagatgctgccgtagtagtgcgaacaaacagagagttgtccctggtgactggcatgcttcctttctgagatgagagactttctatagcttcagcattccctctctctactctgacctccactatgctaactagagacacatatttttcaggtcactgcactgaggcattatattttctaaggagcatcgctgtacttctggactcttaagctggggtgctgttttaacatgtccattgtgtactgcatttctctaggaggctcattctcatagaaactatgatgcagtcatatagtaaaccacatcaagtcaggagtttagtgactattgtttattagtttttagtaacataacatgcaactcaaatgagatggcgtggattcaggggttgtcaagacagggatttaagtgttattctctgcatttaaataatgaatgaactgaggtagtttaaccaatttcatcacacacaatcccataaatatggccaatatcggagtgatagtaaccaatggtaaatacatgcttattattttccttggaaataaaggacagtataggaaacgatcctctccagtcaggtcaggagtgaacactgtgtaataaaggggcccgttaagtataggagcttgtgtttttcctctttaactgcagggtttcaagtgtaaaaatggcggatgtatagctattggatgggagccagtgagataatatgtatatagtgaccagtgtgggtctggagaaagtaagtgctctataaatattagcccttaaactagcctgttgtcttacatggtgttcctcagaagcagacatgtagaggaggagtgtgctcagctgacctaagaggaaaggatcagaagagataggagcaagagagtatgggcacaggccatggaaagtgaagaggacccccacaaatgacagcaagccagtactattaaagatagattgtctctttctagtgccttccagatccacacactattaggatagttgttaagttgatcaaggggagcccctaaagaagactgaagctgcatacagttgcaaacatagcatgtagaacctggagatggaacaaagaactgtagaaggatggagaggtcagatctgttggaaactgtgttcattcctgaacactttcagagttcacagggaccaggtatatggatctcatgttcaaatggaagccttctgatagaaaatggcaactctactactcaaaactattcatacccattctatccatgagcagccattaaatcaatgccagtttattaaaatgtggttcagggttgaagacaaaatcctagacaatcttccttaggtttcctgggtaatctcccagccaatgtctaaatcagccatagacatctgagagggatggtggtagcaagaattgacttttatattctccttaaaagaggaaatggtgaatgggttttgtaggactattcttcctgccacaaagtatttcaatcatcaagatttacttctgaagcaatctagtctttggatctatctagctttttttcgaaaacacaacttgaacagtgaataagggaagtttaggaaagtttaaaattcagagggaaagaaacaaaattaatagacattataaatttccaaaatagtagtaatggtctccatcatatttaaaaatgcatttatatttgtaaaaagatgatctattttgaactgtcattatttctaatgtacctcattttagggtctcttaagaaatcagaattggctgataagcaaaacacattatgattctgagcttgtttgaatgataattcttacattattctcatctcagttctggacctgtccatcactgaaagtaattcaaaagaaagctttgcccaaagctatgtgagatttggaaacagaggcttaagtggtgaataggaatgagattccaaacttaattatcaagtcttctggtgatgtagtccacagtcatcagtagagagcttacttgtgtttgctttggactttcctgtaatttggggtcatgttcagtctgaaatttgaggctttttcaaagtcttatcttcacataggacaatgtaaagctgtaagatgagacagcctgtctgctttgccactctagtgggttccataactggaagggactgaggatcggtttgttgctcttggatagtgcacattgctgctgtctatgccatctctctgatcagttgagcacattaactgtgcccttctttaattgtatgtacttatatcttactcctttggaattttggaccataaacagtgacttagaagcctgaagattgggcgcttaagtctgctgccagagatttactgacattgttttaggtgcaaaatgctaacaggcaagccaactgttttcaatccctgacttagtatagtttggagagaattatctgagaatgagtacatttttcacaaccgcagggaaatcaaacacaaaaggagttcctgaaaacgtggatttaagcagaagtctatctttcccatctgatgggcatatttttatctaggaaaatctgacctgcaggacgtaagatgtgggtggtgaagtgtgattccaaagtgtctaccaaaagcatatttgtacttggtctgtctctcatcttgcattttattttgaatattttggtgacgtgtttaaaaaaaacacattatgattttgagcttattatcattcttacattattttcatctcagttctggacctgtccatccctggaagtagttcaaaagaaagtatcagctaataaagggaattataacttaataatagtgtactaacttgttgctggaaaggacctaacttttgcattacaatatgacacttgatttgcttagttagtggtcttctgggttttgtgatcctgtgttttgaaggattttgcatctgtgaaatggctggtcgttatattttgtcacatctttagccatctttagttgctgtttaagtctctcttttatatactcttaactacttgaaataagaaaatacccataaagcatatctgttgcagctccattttaaacattcagtcaacattcagtaatcatttctatctgtcagtcaaggaatatttatttgagtccaacaatatatcagagacatgcctatcagctttgtctgaggacatgaaccatgatacagtccatcttactttgaagactgtcagccagtaagtgtttaccgagttcaaacaatgccagggacattgctagctgctaggagttcagagatggaagacctagtttcttttattcacagaaatgttataaacaaaaacaatgcagtagacgtaagtctttatcttcaggctgcttagaacaaatatgtccttcgtcacttataaaaaacaatatctagacacagttctgaaggctaggaaataccccagtgcaatgatgggggccctttcttcacatatgtgcctttgatctgtgtctccttatgaaagaaaaccaaatgggcaaacaaaatttctcaagtctccattgtaccatccaaaaagtgaaatctttataagttgatcccttccctgaggcttcccttacttcttgatagtatcacattgcactgtgtttgggaaggaaaccaatactcagaccacagtacagtggaaagctagactaaatacaattaggttctcaaatcaagagcttctatttatgctcagagaataaagggaagccttgaagctgagggttgatacatagaagtttgccataggcaaaaattgtctgtagcccagagtcatagctagatgagggtctgtgtatgctattcaaagtgattcttgtatatcattattatattggttattttaaaatgtcatcttaaagaaaaaatctattatagttaagagaacaagaaatggaattttccagattatatcattgtgatacacaaacttgaatctactttttctgatttttaatgttacgactcattgtgtgataataaaatttgtggggatagctttgattatggtcatcctagcaatgggcatgttgagacaggacgattatatattcaggttgagtgtggtctacatagtgacttgtagcccaggatggtcttcagaaagagatttttgtctcaaagaagaaaaagaggaagttaggaaatgagatagcaagagcaccagagggaaggagactgtaagaaaggtgatataaaaataaaaatgtaatacataaaattatgtctagctacataaaataaaaccattaaataaaaatcataaaaaagtaaagaaaactgaatttgatgaaatttttaattttcttaaggtttctggcagcaacatttgtttgcttttgtgaagaccactagaattatacatgctcagaaagggaaagtagtattcacggtggacttaagactgtgcagattattttcttattagtgagttaatgttgacaactgcgttttatttctctgaaaatggctaggatgatatgattgcctgtgcattcaagaagatctacagaaggcaaagaagtgaaccatagatagtaggcaaaatatgtgatgaaggagagagattcaagtagtccatccgtgtaaaggtgataggaaaggggcctcaatcctacacaaataactaaaggcagctagtggatgctgagatcagaggatatagtccttccatggaagtatacaccaattggttatccaatgccaaatgttcatccctgaaaacatatatacaagtaacattatacagactgagtggttatacttatgaatatatatatatgtatatattcataatatattcattctatacattatatatgtgtatatatgcatgcaacaaaaaattaatataatgtgaccatggatttaaaagacagcaggagcttatttacgtggagtttggcaaagggaaagagaagagaaaaatgtttggactataaacttaaaatttttttaaaggctaaaaatttaaagaaacttataggaagttcttgggaatctccaaattctattgcctcagcaaacatggccacctgtggaaaccttgcgtgctggttttagtgttccgtgaaagcatgactcttcaattctgtaatgtgcttctacctatgactttcaaatgatgggaagctgttggtttctcctgtgacaaacctgtgattctagtgggggtagaatcagcgtcatagccaaaatagctaccaatacaagatcttgatacatcatttcaatgatctatatactgttggtagacaaaatggctaactgtatctactgatccaataaaatgttagaatcaaggtcaagttcatttgctaaatagcagtttcacgtgtaagcagtgccatcacaccattctcgctgtccctctgattttccttctctcattagcacaccaaggccaactgttctttcatttggttaactctcccattcttccatttactcctgtcatagggatctctgagaagagatgtttatgaaagcaacaactttatgcatgatcataggcataacttattagtatcagtttgataggataaagtatttccatggtgaaattagtatgcagggtggttatataatctcctacagtgaatgctatgagtgttcttatcctttggacctaaccattctagaatattcttgttcacactatcctgtttgcattgtatggcacttcctttatgcaacaggaattctggactcactccacctagtaggctgcaatttttaagtgtgatttttcccaatgtatccttcaaccagaaattaatgggtcgcaattggtgatcagagtttgttctccgtttctagtgaacatctaagtgatcaatccctgttcattagaatgtttgcttttcctccttacatttccccataaatgacaaatttcagtgcttttatatggttatatctatttctagatttttttgaactactgaactactcttatacccatataagcctgaatgtaattacccctgagtgtcctgaatttgcccttaagctaaaaatccccagtttaaataagtcaaaattcaaaccatgtcctaaatgaataaggaatttactttcagaaaggaaagtgcaagtgtttgcgttgccagccagttgtgtctctgcacactccatattaatattgatatcagtatattaatagcttattacatgaagagtgtgtttgctgtgaaatagtgtgcagctctgagatgatttaagagaattttttgttctttagaatcttcaccttgctaggcatactgtatctactaccactgtaactttgatggctgtctacgactttttctagaacatttcagaacatttattccttttatttgggattcaacaatttgagtcttcatgtgatataaaaactggcattttttttaactcaaaccacaaaattactctagttgggggaggatgtataagaagatatctgaaattacttttttcatttaaaagtgaccttttaaaagcctctgtaaattatactgaaagctttcctaagaaagccacctaggaaaaactatatgtaagttaaaattatatctgacctactatttctccttaaataaatgtttaaataaaatatttcccaattaggatttgcgattgagtgttaatatatgtccttcaagcattagatgtcatttaaaacagttaaaactacaacaacagcaagcactagcaacactgatggcttcgtcatggcttggtggcaggtcaggctgctttcctgcaggatgcttggcaggcccaagtttatgccgtcattttctgactgctcctcattgcctttctatcttcttttaccatagttcaaggttcttacattataagactttgaaacactcaatctaatatggctgagttatgctatttgcccaggagaaggctttgggcttggatgaggtgctccttcccccaggagctccatcatgtcctgtatccaaaactaactcaattccacggccatgggaaagtggtgtggtgtgatgcatctcagtgcctggaggttcattttaacttcaataataaaattaccaaatcacctagaattgaacttaactgtgcaatattatattgccctggccaattaactcagtgaaggtttgaggtaatatatttgaaaagtacttgtaatctgaaaaacactagacagttgttaattgctgccattattattgggaaaggagaaatataacctacctgtggccactcacagtggtgaaaatgtctcagcagcgagcagaaaacagctcaggccttaggcaagtgcttatcatcaaagcctttctaatgactctgattcatagcagatgaaaactaatgccaacatttttcaaactagaggtcttcacccatgagcaggttgtgaaatagccttgtttcctggagaccagaattctttttttttttttaaagaggatagctgaataaaatttaaaagactgtactaatagctaccaaaaacagaaagggagactattttttgagacgatttctaggcttacgtgtgtgtgtgtgtgtgtgtgtgtgtgtgtgtgtgtgtgtgtgttatatggaaacatcaaatattctaattttgatttatggaaaaataagtaaatctagtaaaatgacttttttatctgaatttaagtatatgattttttttgttgctgtatgcagacttgatagttactagattgaatttaaatttttatgcaaagggttggagagatggctcagtggttaagagcatcatttgttcttgcagaggatgccagttcagtacaactgcagtacacactatatgggtcacagccatctgtaaatcccagcttcagaggatctggtgccctctgatctgcgaaggctccaggcagacaaatgctccaactacacagatataagcaaaacatacatgcatgtgaaattaaaataattaaatctaaaacatttaggaatattttattaataaaacattaacatatcataggcttatcattcctgattccaaataagacttaaggttcagccattcatattcttctcctaaacaaatatctatttcagctttgtatgttgttttagaaatgtatatataagtgcataacaagtgtgaaaattttaattcacatatcatcatttatgttaactaacagattattattgtttaaaatattaggttttctatgagatatattttataaacctttattctttaaagcttgatacaaattttacaatattatttgaattattcttgtacatattctctttcatagagactatatcagttatctattgctgggaaacaaatcaccttaaagaaagtaatactctttccctgtgtattcattgtcaattttgtctgttgttggcctaaattgggttttctttagtgcttctgtaactggccgggtagaaataaagcttctaaagagacaatatgccgctcagtctgactatcagattatggaaataacggacccaagagtatctcccgtcacagaaatcttgtgacgggaggaggctccagtcagatggggaactttttttctgaaaacacaaaacaaaaacaaaaacaaaagcataagcaaaagcaaaagcaaaaaagattcataacatgtctgaacatttcacagaatgagactgaagcccaaacaaggatcagtggtgggcaggaccacgtcttaataaggactcttggcatgtacctagtatttagtttaatgtcattttagaaatctgaagatggactgaagaggtcaccgagtctctttgtctctcccaaatgtggccacattgaataaatctacttttttgtttttttaattatattattaatttcactgtttgaattggcttcttaggaatgggtggtcaaatggcttgttggggtacagactgtgaactccaaggctaagttctacaggtctccttacctacccttctttccttcctccctccctctctcccccctcctttccttcctgtctttccttccttcctttctttctttctttctttctttctttctttctttctttctttctttctttctttctttctttctttctttcttttctctctttcactggagaaatgccaatgaactctgtagacaaatgtccacacctaccctctttcttgattcttgataaatccatatttaaaagaagttaatgtcggaagtaatcaaacctatgcctttataagtttccttaaggagggcagtactgcttctcactatggttgtactaagtagtttgaagagtgtggttttgctgatggaagaattgtgttttctgaggagattctgacgctttatttagatgagcacacatttccccaaaactgtgtgaagacactggtcagtcaagccaagttttggattgttgaaccttcaatttaacaacactcctttgtgtctattctctttccacagatgcctcgaaaagtcctagttctaaggacgatgtcactcagtgcctcctacatcagtgggatataattgctatatttagctcaaaacttgggccagaaatgcacacatttcaattttgctaataaaatgagcatattctgctgagaatagtttcatccaacaactttagaaataaccgaattgtagagtgggttttatatatagccatttgcctcataccgaacaaactaaaaagcaaagtagaggatatcagagaatcaaagctcttggtatctgttcacagagtgatgctttctatatggataatgggatacttccttgacctgtgaatatcttatcttattgcacttattggggtaacgttgtgaagaagttggggaagctgatgcgagggcagtatgtctgagtgtgaatgtaagctctgtattgtgttacctctctatcacataatgatctttttatacttacagagtagagataataggagtggttatactgtaaggtagtttttgagaaatgtataggtctggatatgtagagtttatcggacagtttccagggtatcatgaagttcctggaagagtgggatcagggtagacttcatctgagaccactgtctggctctactcagttctctgtatcactggtgtctttcctccccctttttccagcagtcactggggttaatcatgtcccttcagtctcctgtcttagcccccgtggtttgcagcaactcagcttaaaatactttatggtgctggcttgttttattttagtctatgtattttccccactgagaaatactgggcaaaatttatataagacatgagacatacaaaatgaaatgatggtcagggtgtgtgcacgcgcatgtgtgtgtgtgtgtgtgtgtgtgtgtgtgtgtgtgcatacatatgcatctaatttcaaaagtatgcaaacatatgcctttgattattctttgaagaagggttatcaacttctttttagaaaagacctctcactttgcctgatcctgccagttaactgttcctgtggatcattcaaattgagtcatgggaaaggtagaaataacaatgacaattgcaagagatatgtaatattgaagtcaactttgatgctgtaatgcatgccaaatacttttcgggaggattgtcttaatatgtgttgcacttgtccattgaacctttcataatccagaacttgtagaaatgagaaagaaagcctgatgtctgacagggagccatgagttgtagaacagtctcttttcattcacctcattgtctcctccattgccttttcacaaactgctcttctttcttaacttttcctccaaagcttgttttgttgcttactgttttttattattgagcaaaaaatgaaaacatacattccgcatctccgtcagggctagggggtgaagacagaatgttggcttctcccacatcaacacagtgagatgcagggatgcggagtactctgatttcctcactggattgacagctcatgcatatggcaaaatcagctttcaaaacaagtcagcttcaagcagcaaacagcatcttaaacattttttttctacgatgcaaactattttagtgcaattctggtgagttttaacattattttttttttgtcttttccaatgggcaagttattgattaaagctggagacaatacatcttagttcaaaacactgttcacccatagttttggttggttcagggcttaactgaaaataatgtttagttgttgttcttgttttaaacacttcggctgaatgattacccaataatgtcccccaaaatgaacaattttgtttagtgaaagtcaaatacttggaactggagagatggctcaccacttaagagcacttgttgctctttgagaaaactggagatgaattcttagcatgcatcaaggctcacaatcatctgtaactgcatgtctctgttgcctggtattgactttctagtgtctactgatgctgatgtttatggttaaaaatctcactttcggctaggtgtattggaccaccaggaactcccagaactaggtaagcggaagcaggaggatcttgagtttacatttgggcagctatgctggctagttttatttcaaattatcatcaattgaaaaaatgtttccataagatccagatataagcattttcttagtgattgatggtggaggccgcccatcccattgtgagcagtaccatccatgagctgattgtcctgggttctatgagaaagcaggctcagcaagctatgaggagcaagtcagccaccagcacccctcagtggcttctgtgtaagctgctgcctccaggttcctgcccttcttgagtttctaccctcattgcttttgatgatgagctgttctgtggaatgatgagtgaaataaaccctttccttccccaagttgctttggtcatggtatttcatcatagcataacaaaccaaacccatgtcttgcagtatgtctcaaaatgaatagtttgttgtaaggtctgtggttgtagatcaacacatgctcaggtcttaggtttagtcccaggaccatgaagtgggagttaataaaacagagcaaaaccaaatgtaacttctgatccttccctttttgaaagtgagatctgtttaagattcttatttctgtcaatagtatatgaaataattgatctaagtttttatcaactgtctgagtcatagagagacattaaagaattagagagctgctgttacataactggcctcaatcccatcttgtacccttttactgagagagcaaacaaacctacgcaaatatggaagaaattagccaccgcctttgccaacccccatgctactcactcagaagaacgtattgttgttcatggtacaggctgggaatgctaaacattcttaagccagggccttgtgttccctgccctgctactgtgttttgttttctgttttaaaacttttctttatgagaaggtttatggcaagtggtaggcaggattctctagactctcccagtgagcctgctggaggtgtgggaaggaactagatggggcgaattttgttctggctttttcagcttgcttgtggctggtcgcatccagttgctttattgacatgacgatgctgtcacctaaggctcctctgccatttctgccttcatgaggttcaattcagaaacctgtccagtataatccacttttcattttttcattttttttattactgaatgtattaaggattgacattccaaaatgaatgaaaacttaggatcaaatgtatttatgaaaaacaatttatatctcttaagagtgttagtcttcattcctcatactataatttctttatgagtgtcttttgctttaagtagagaaatttctagtagctcatctgagaggtctggtacatgtgtggcttgaaaataagatagtttgactgtgaaatgtttgcttgacacagcaaagagataaggtaagttaaacttacccataaaagtaaaaagtacaagacataggggcctggaatcaaacaagcaagacgcaagattaatatttatgtaggtgtagggatttaaaggcttgtacaacccaattacataacagagacaaaataaggtaaccctggttctaacatcttataaagaagcagccacattatataactagactgcatttatcaagtagcacattccacctacacagctttggaggaagatggaagaagtggggaggagggggagatttctaaggaataagaaggcagaacaatgtgaagtgtgtggtgctgccgtcctagcgaacttctttagcactgtccgtaacatccttcgcagtagtctttggggtagacaagagagttcattggtttgtgtcctgagatgtctgcataggagcttgggttgccataggtgctgtcactgtcacagataacatcatgtgtgctgctagtgtaacagcatcatgaatcagtacagaggagagaaagcaaaggcaggatggtaacggccagctttgttatgtgaccagtggttatgggatgtgcaataaagcagagtcatcatggggcaagcaccctggagctatttctattcttttttcttcatcatgaaactgggtgatttttttttttacttctttagtatcaaatcttaaacagtcgtaattcttgttgaaaaggtgtgtattactaactctacttgagtacacaccactgggaaaatcaaactcccagccaactttcttgtttattccctataattttagccatgttagattgttgagctatcgaggcaaatatcctcttcccaagtctaccatatagaaagtacataggatctttgtactgcctcagagtttgtgtgacaagttttgctgaaggagattaatttaaagagcttgttaaattaaatgtcacctttgaagcatcagacagtgtgtggtccatactttgtcatctttgcatttgtgctgttggagtgcctgacagctggtgaggaacagtggggtccatgtccctattccttatggaggtttacattcatgatacagtccagctagatgaaagaaaacgtggcaaagcacataggtgacaatgatcgaggaacaactcctatgatacagactaattccagtctccagtcagtgacctaggtggaaatggactccagaggttgccagcaatcaggggggaatgtcccctctagatgtagcgtgacgtaatttctagaaaaatgaacatttaacaaaagaagttggataataattgaattcatacttaaagactttggggataatttagtcatttcacagtattaatttctattttatggcagcctttatttgactgatatgaatagcagtggcttacttataaatctgctgagtttgaagagaaacttggccagaatgaatttataaaaagtcctttctaatgatgaattttgattggtaaccgtacttcaccaagtaaatggttatgttggaatcagtggccaggtcctgggccatctaggtaggttctcgatcactgcgagtcctattttactgtggcaaagcatccgccccaggagcttccctaggcaggagacccagctccactggctgatggaaaggcttggctctgctgagctcctggcagtgtgaggttttgtcaaagctcttttagaacattatgttttaagagcagtgacaatttgcatttaagaagttgattcctggtggatttcaaaggttgcatgaattcctgtttgaaaaagaaggtgagaaaataaattgttccaaaaaatgagacaatacaaatgttgtgtgtgggctatggcccaagatatatctgggttccgaactcatcaattttgtgtaagacttggacagagatgctgtttgatctgtaacactcagacaagaacagtttgttagaggaaacagcggtcagtgatcccaaggtcgtgaagtgtatgccatcattaacactgatgaaagtgatcaaaggggaggcaaaacgcagagatcatcacagccaggagtgcgagtgtgggaaatggaaagttaaaaaaaaaatcacccagttccatgatgaagaaaaggaatagaaatagcccaagggtatttgccaggatgagtctgctctattgcacttcctataaccactggtcacataacaaagctggccgttaccatcctgcctttgctttctctcctctgtactgattcatgatgctgttacactagcagcacacatgatgttatctgcgacagtgatgcaaatgccctgaatatcagtctttgtctttggatgtatggcattttaaaatgtaggtttatagacacatacacacatacatgcacacatgtgcacatacacagagagatcaaataatgaataaaaaattataaatatgaactaaagaatcacctttaccatcagaagtaagtcatcttcattcacattgtcccattattgtatcttggcccacctatagattcatatataaaacaagtacgaatagcttcacaaaactaagattgttctttctgtagtcttaaaattctagttttattattgatttcttccctaaggtacataggactaatcagtcttttctacttcgtctgactccatgtcttggtattgggtgtctttttatttttattatttatttactgatgtatttactgatgtatgtatgtatgtatgtatgtatgtatgtatgtatttatttatttatttatttatttatttatttatttatttatttatttattttaccctgtttatgattaatggctccatcttgtcctggaacaatgtctctgctcttcattttttaccagcaccatatctaaatgtaatttgtactctccacctaagctcaccatggccttgcagccctaaatcctttgtcttgattcttctctaccttgcctcagttctgccctcaaagtctctaacagtgaggatgtagccagtgcacccttgtgttatcctggatggtcttccgtggtgggtcgtctggttaggtatgctattcttggatcacttttatagccattgcttcttagccttctagcacagggtcatgcagaactttaagaaggaattgttctttccttgtgatgaattatttgcttggatgtgtaaaaaaaaatcttccttattttcctctaaactaggatgccttccatagttgctttgcccccctttcatcttgctcggatggtgcttttcaaacattctgccttttccaataaaatattggtgactcttggcttccttcctttgtttgagaccagaatgtttccattcgcagcctgtggtctgagagctgggtgctaaggcttcattttttttttttttctcttcagtggggaggctgaagaggcaaccaatgctgaacaattatttggagaaggtcttgttttgcttttaacattttgttgtatagcattcctcagatttacataactgcgtgtatgtgtgcacactcatgctcctgcttgtgtgtgagtgctggcgtgcatgtgcatgtttgtgtatgtgtgtgcctgatgtatgtgtactgtgcatgtgtatatgtacatgcttgtgtgtatgtccgtgcatgtgtatgtttgtgtgtgagtgtgcatgcgtgcatgtgtacatgcgtgtgtccatgtgtctgtgtgtatgtctgtgtgtgtccgtgtccatgtgtgtccgtgtgtgtccgtgtgtccgtgtgtgtgtgtgtgtgtgtgtgtaatgggtagagtcagtgattcccagctcctcttgatccagaaaactctgttactttcttagctatctgagctattccacagggttaaactctgtttttgttctgtctttgttataatgacttttctcttttgtaaatgtattctgcaaggcactatttaaatctccctttatgttttttaacttgagatcctcgcagtgttttgagcggaggtcaacaggttgcttctgctccttttgaaggcgtttgttctgcctgcagagacagtgtggagaggagcacccagcttctcaggagggtctttagatgaagtccaactggcttcagtgttttcattttgcttctttaatttttctcttttaagctttcagttcctgtcagtattgagcgagctctccttccttcttcaccccccattgatgagctgaataatgaggaatattcacaacttaccaactttctatttattggggaaatcttttttctcttgacttattttttcttgattattttttataaatccagagagagatgggggggggggcagggcagagaacattcagaaaagatgtgttatgtagaccgtttaagcaaagtgaagtcaaacaaagcaaagcaaagcaaaaacaaataaacagaaacaagccacagtgtctttgatgtttcaaaagcaaaacctaacaagagaataataactgaagtagactgtccatggcatgtgaggatgttcaccactccaaaagcaggtaggacaagaagcgggcagtgtcctactgcatgtccaaatgcctcccattgatctaggtgattttttttactctatggataagcagtattcacaggtaagaacagtgaagcacaacatccaatctgatcgccctgttgtacaccttgctgctggtagggggtgttgtatgacacatctgtctcagtgtagctgtggaagtgacatgagcaaatgcatggaagggtatgatgagcctctgatgaatattttctcttcttgctgctgttatgtcatccagtgaaagttccatgtgtgaatttgctttcaataaatgttctttttgcattattaatgctttccaagaaaagtttgcatacaaagggctgtggttttgctgcttagtgatctgcgtaaggccaagagagcctgacagactctgctcaggctaagtaaccaggctcagggcagtgaggaaactgtgaaccacaagggtctacgggatgcactgctggtggggtagaggatttgggtggataagtactggtgctaatcttgaccatacactctgcaaatcgctgttcatttcattgcactcctcatagagttagttgacttcacttttgaactcagaaattaactgtgagtcacttcatatgaagtgtgtgtgatgacaagcaacacagaggggagagggcatttgaagtgtggcttccacactgtaggttactctaaacagaacattatcgtgcttggtctttgctttgagtttatatcatcgcactgtttttcagcatgtgtacccctcattacgctcacaacctgtatctctgatcctaagaatccattaaaaatgcaaactctcagactctcaactcaagcctaccgaatcagaacttgcagttttacaaaaaattcacagatattcatgaatatcaacatttgctgttattgcatgtgctgatataggtgagactttcttcgtggagaaagctataatccgcaagagaaatgtggatataaatagtctttaaacccataaatgatgctccccaactcacattaaattctgcagatctggggatgtggtagctcatgcttggaatcacccaactcaggagggtgatgtaggctggccagtaatttgagactagcataggctacacaatgaattctaaagcatttttgagcacagagcaaatcattatattgaatgggggattgtggtgattcaaaaccacacccaaatgcctgttgggtttcattttctttccctgacaggttggtgaaaatgtgaagagatggtaatctcctatgttgggcatggccaagaaattgatgctggaatttctaggagtttggctttgggtggggataatctctggagatagttgaaatcatggcctctaacagatgcatgcatcccattttcctggcagggtaattcaaaatagactgaaagtagaaacaagtgttcatccacggatggatccatagagaaatgatagacacatgcatggtgatattattcggctttacaaagggactttttaaatactttattagatattttcttcatttacatttcaaatgctattccaaaagtcccatataccctcccccgccctgttccctaacccacccactccagcttcctggccctggcatccctctgtactggggcataggatcttctcaacaccaagggcctctcctcacattgatggctgactagaccatcctctgctacatatgcagctagagacacagttctgtggggtactggttagttcatattgttgatcctcctatagggttgccgacccctttagctccttggttaccttctccagctcctttacaaagggatttttatgtttaaacatgacactccctaacagactcgtgtattggaggcttggacatgagctggtagattcagttgttgaatgctgaatggttctggagagcgctcagtttcacactggagtgccaagctgatcccttttttatttggtgaaattatggggaagtgatgaaaaccaggcagtgggacttggttggagaaagtaggtcaagaggtcatgctcacagtgggtgtgtctgatgctcagaccttttggcttgctcttagtcagtctccttattgccatgagttacacaccctctccatcacatcccagcataacaatattcaggctcatttcaagcccaaagtgctgccttcagttgaccctcgtggcagtgaggaagccaatcggtcaagtcaacctgaaactgaagcaaacagagtatttgctcttctagattgtttcatatatttgccacaacaatgaaaaactagtacaagaatagaattctgataatttctagtatatagataaatttgaagtccttaggtttatggaccaaattgtatgattatacatacacgaagtccataaaaggagctaatgtgtaaaattgcagttagcagggactgttgttgggtgactacagaattgctacttgggatgtcaaaatagtgttttatacaaacagttgtcatggttacacagcattgtaaatatactcaatgtcactgagtctaataccttaaatcttaaaatggtatttttatgtgattttttttcatacaaaaccgtagtgtgtctacacaaagcgttgctacacagtgacagcagaaattacaccgcacacacttatgacagatttgtctaatatgatgttgcttgaagaaagtcatgtgcaaaatagtggacagcattaaatgtagggacctcatttatataaaatatagcaagacaaaagccaaacaggtatataaggagtgcaactaaagtgattaaagtaataagtaaaaaagaaagcaaagaagccttatcacaaatggtgggtgtgttagttcatgttctgttgctgtaataaaagcgcttgagacagtctgatttagacaaacgatgctcatttagtttacaattctggtagccgcaaaatcttaatagcatgagtctagatactctttttgtcaaacatggcagaaagacggaaaaggaggcagccacatgtagtaacagccaactgtgtggggtgaacttactttgatatcttctattgcgaattaacacactctacaaatgtgctagtctcctctgagggtactggttccagtgatataattaccttatatttcataaaggttccaccactccatcctgccacctggacaagcaagtgtccagcaatccatgtccactatagcagtgggtttatgcctttctctagtaaggatcaggcgagcaccatgagtgcataagaaagtgccttggagaggctgacaggccctgtaatggtcttgatgggttttatgtgtgtgcattataactcacagtatgtttttttttttttttagtagaaataaacttattccacaaggctggtaataggagagtgggcatagcagggacaattctttcaaccttaagctgttatcaagtatgataaacctgtaatttccactgtatttaaattttcagttaaaattaccataccagaagatcatcaaattgtctgtactagattactgtagtatattttgatgtcatgtctttagtttatgtagagagcccagaaaatccaaatgtttgttttgcatacatgtcaaaatgattgcattataaataccactatcaagtttgctttgtcctcagaatccctcattcattattaagttgcactttgatactctccattttagctgagagcaaggagtatgaaatgtttaattattagaaagaaaaagaaaaaggaaaactgaattctttttcaatttaaaatctgtttggtaagagtgtagattaaagcacaaatgatccctgcagaggggcctcctagaagctaggttaactttctttttcaaatcataccttaaatttctaggtaacaatttgtttctggaaacagataaggcaagaatcaccctgtaaggtcaggttcctgtagctacctctgtcccattgggtgatgggttctttcccagaatgcctgccttgtttagattatcaacttcaagtggacaggaaagctcaaacgctcatgtgggagtcatggaatttcaaatagcataagaatttgaagagatgttgttactatgtttctttaaaacttcatttatctcccaacacagttccatgctggggagtctgtgcttctgaacatgaagggttttctcttggggatagttgttttggggggaatctcatagccagtagttggggagctattctttcttatgatcattaggcctataggatgctgtcatgcaatcaaacctcaacagcttttagaaatgttgctttatacttctctcttccatttggactgtcgtctgaataagttattcttaatcattttaaataggaaggcactttttagagtgtataacctgttatcagacttctttaacacgcctctcagggttcagggatctatgcagaacaggagacagaaagatcctaagaattagacgattttgaagaaacagcactgtctagacacagcagggcagctgcacatgtgaactcacagagactgtgacagtctgggtaagactcctataagttcatgctaggcaaaaccccaacagacaagagggtggatgggtacaaaatctcacccctagctaagaaactatttgcaaatgatagcattcgggaaagggaaaaatctgtttacttcagtggagtgtcactgaaaatatcaacactctgtgtacaggggaagttggccccttattttttaaaaatatatatttttttattaggtatttttctcatttacatttccaatgctatcctcaaagtcccccataccctctgcccccacttccctacccacccactcccactttttggccctggcattcccctgtactggggcatataaagtttgcaagtccaatgggcctctctttccagtgatggccgactaggccatcttttgatacatatgcagctagagtcaagagctcaggggtactggttagttcataatgttgttccacctatggggttgcagatccctttagctccttgggtactttctctagctcctccattgggggccctgtgatccatccaatagctgactatgagcatccacttctgtctttgctaggccctggcatagtctcacaagagagagctctatctgggtcctttcagcaaaatcttgctagtgtgtgcaatggtgtcagcgtttggaagctgattatgggatggatccctggatatggcagtctctagatggtccatccttttgtcacagctccaaactttgtctctgtaactccttccatgggtgttttgttcccaattctaagaaggggcaaagtgtccacactttggtcttcattcttcttgagtttcaagtgtttagcaaattgtatcttatatattgggtatcctaagtttctgggctaatatccacttatcagtgagtacatattgtgtgagttcctttgtgattgggtcacctcactcaggatgatgccctccaggtccatccatttgcctaggaatttcataaattcattctttttaatagctgagtagtactccggtttttttaaagggtgaaaaaacatgaaggtggattgataaggagtggggaggctctggaaggagttgagggacagagaagaataaaacataccatatgaaattttcaaaaataaatacagaagaaaaatggacatagtgtgctctattttgtaattaattcaacagtaaatattgtatctctttttttttctttttttttggggggtggggtggggtggggtggagtggagggtgtcaatacagggttgctctgtgtagccttggctgtcctttatcttgctctgtggaccaggctggctttgaacacacagagatctactgcctccttcctaagtgctagcattaaaggtatccaccaccactgtctggctaacatctgatttcttcaagtgcaaagaaaatagaagtttttgtttcattatctcttcagattcccatgctcattttcctaattggccttttttgcaccagaaacaaagaaggtgcggacagtacagctaaaagcttttgctctgcctgttcatgatttctgaatacattttgtgatttccacccaaaatattctccaacatgtaagtaaaatgcatagaagatattccctaacactatttacttccctactgatttttctttaagaaaagcaaaagaaaaggaacttcagaagaatacagacaaatattattatccacctttctttgtgtttaaaaataatcacacagaggagaaggcacagatcgccttaaaatgcctatagactgtgtttgtggtggtagtggtttaaacattttggtggattgtttttactgcaagcctcacagttggtttatgtcccaagaagtttcagtgaaatctcttattctttcctttaatcgtattttctcctataaagttaaaaataacatcatgatagaattgttggaaagaggacatgttagacaagactctagctcctgcactatgggtcgtgtggcttcctaagctacactgagctacataggtgagagcagctatggcccctgtgatatagggactggcctctctgctatgccggtgtcctcaaacttagcttctaccctcatggtccaagatggttgattcagctccagcttcatagtcaccagcaagaagcagagagagaaagggactctacatattgcaagaggtcaggtgtatcacctccactgccaattccatgaacctgtggttagtcacacaaaaggatactgagaaatttcatctcaattttatagtcttatacctagctaaaataggtagttcagttagtactcgaagaacagaggcagggtattggaggctatctgacaggctgacacaatatataaaactctaaggaaaataaatgtcattcataagtcttccatttttgagtttagcatacttcctcccattacttagtgcagaacagaattatgctgtacagtgtttagtactatctttctttaatttagtaagatgccctgaacacttatttcctctagtagttaaggtccatcaacatactactttaagaggggcatagtattatatactgggtatatacaagcacattacatacttcaccaaattcatatttttcagtatttagatttttgtaattgttttaaacacattggtgtttaaaaattattttggtgaatgtctaaggtgcataacttggagctacaataaatattgtaaaatgagccatcagaaaagaacataacaagttataccccaaatttatgtataaagatattcaccatctgcattctccccatgattagataatattttggcatgaattattgtttgaaaattattgtttccctctgttttgttatgatcatcgtaggacctttaaaacaagttcttggtaatttgtgtatctagattaagatttctccatatgatattagtctattttagtaatggatttctgaaaagcctatgatgaggagacagttcatctttgcatatattttctctactaacttagaggaggccttctgtttcttaaataatcatttgcattcctagaaattgtatctgctaatatatatggaacaaatacttttccctagtggggcatcgataactggcttgcatgagtggatagttcaaaatggaacagacagctaattaccacacataagggccctactgctcaccgctggcctcggcttctttgaagcatatctttctcattcgagccttgtttcttgactgaccagtgcatgtttttcagtgttaagtttgaatgcagtcatgcatgttacactccctggctcatgcacacagggagcattctgactctcctatggatttacaataacagggttcttccttattgacgtttcccatcaacacactttctctgtcttctgcatgagatgcgtggcataacaacactggaattttatgtctttaaaagaaattgtggtgtttgtttgtttttttctatcatgccaaggatgtttgcccttctcttgaaatatgaaaaagtgtgactctgtatatgatggaaagtcattgacaaaatattctggaatccagggaagtattttaactcctcaggcttgccatagttccttgaactctgcccacatctcttgtttctgtggtctctagtctcttgttctaggcttttagtaggggctactggtctcttttgcttgttcattctgggtcagtacaaaaggcttgctcctatagctggtgctttggttttgcgttttacatttgactagttttatgtgcactttctaatatgtgcactggttaatgtgttgattttgctttatctcctttgctagtctggtctgctcagcccttgtcttgcctctgtttacatcttactctctatttttctcttctcctggtcatatgttctctttgtctacagagtctctacttcaggatctattgactctttaaaccagatgctttgtttgtgtttgccctggtagatattcttcctaaaggtatgctctttgttctatccttacaaatataggtacgcaggtagagcagtatcattaaggattaaacttgtgacactcctttatttgttatgtaataatacatacacatcattggactgttcaagtaggtttaatatttgaccatagatataaaataataatggcaggaaatttgaaacttatgacatctcaatcttccttccttcttttcttctttccttcctttctttattttttcttgtagaagtgcccctctcagctcttaacctggaataagaaaggaaaatccatgtgtttatattgctagtttatatatatgtgtgtgtgtatgtgtatatatatatatatatatatatatatatatatatacatgtataattttacttttaattcaagagaaatttatagtgaattcttataatagataacattcaaaatagtataatttcttcagaaatctttctaatgttatttatcaaatatttcttacctgttcataaatggctttgtttggtctatttctcaaaagatgacaattcaatgctaaatatatatgctaaatatttgcacacacacatatatacatgcagttacataattctatagtatctcacattgcatatgacagtgtaatataatatagtgtaacatgattttatacatttgtaaatttatttggctcagtatttcatgggtatttaataacataaaatttatgatttgaatataggagacaaaaggccatgagcatgttgatgataacagcaacaccaatatcccatcttgtccccaggaggcttgctgaagcatgtgggggagggactgggaaccagatggtgcctgtggctggcagtcaatggctcctgctgcgatggaaagcaattactcagtaccagtcccctgggaggctgatgacaaggcaagcatgttccccacattcatctatacaaggtgtaataattaagccaacagaatcatagtgtctgcctgaagggtgtacaaagaagcagcagggaccctcttggcttgttcatcacctccatgttacctccacagactagtaattactcaaggggtttatggcatttacatgtgacagcagcctttgctgctgtagtacctttaaggtccagtgggcagaagaaaccgtgtttataaccagtgaaatgtaagcactgagggcttgaataatttccctgatatcatccttcagaaagattctacatgccttgacagggaggaagatgaagatgcattctagagttagccaccatggtgcttgtcacgggcagtaccattacatatatgttctctgaacagcaggattttttctgttggaaatgtagctgtctagtcttcatctcccagtggtagtggacaaagactaagcagccgattggttctcttaaattagatgtgagatctcgtgcggagtgacccataggctgctttcttccccaggctggagattagaaacacaactgagcggagagcagtgttgggttgctgaacaaggagaaggtaatgagcaactcaagttgaggacagatttagggtgctgaactgggagtgaagatttacaagagcctaacaattgtgccaataaggcgggttgaaaaataagctaatgtgtttgtgtcttttacatgcacatctgagggaacctgggcagggctgttaatgaggtccaccctgaacttgaagtggggtagtagcaactccatgctacacctaaccaatatatttggagttcttggcaaatcctgaagcctgtgtttcaatgctgtctgttctattctttccttcccaagtccacaccctaccagcgagttacaccctagagccagcttcctcttcttggcgaaggcttcaagtaaataagaaatgactgttcatcttacaatctaagactttccctcggatactggtagaaaaaaaaattcagaagaagaagggggaaaaaagagctgttatatcttatgttggttttctctagaagcagagtgacggactggaatcagcatgtaagggagccactgaagacatgttctcaggaaagagtctgagaaaggcaaaatatgctagcgaagaactagcaaatcataggctggaggtcaaatagttatatgaatggagaaagtttgacagagtcagtgacacgaaagaatgtgtggttcataatggaggtacttagctgattgttgaagatgggcctcagcactagtacattagttgagataataatagcacaatttgatgggggatgctaagactgttcagctctgctcaaacacttggcatgtgccttgacagagcttctgaggctgaagtgtgtaccaacttcccccaaaccttgatgaaatgtagtcttgtttcagaaagtttgatggtagcatttctactcagataccctggaaaggtgatgtgcttctcctctggctactgcatgtattctttacattttgcagatgaggaacatgaggcagaggatagccaagccacctggtttaaattatagaagtaggaaccaactggggtgtgggtctgccaagcctggctcctctgggctattctgaaatgctctagtggaaggtctccacagaaaggtgaaactggaaataaattggcgcagccaacaaaggaaagacaaatgtccctgtggtgaatcccaaggtgagtgaggccaagccactggccaagacactcacggacagccatgactaagtatgactcagagagcttggtctgctcctctcccagtttcccttccaacttcctgggactccaaaccatttggctgcagcttgtcagtgtttctgagtggctcagaaggaactaatcagtgagtgtcagagcctctgagagatgaatggcagcaggtataatttctcaaagatcattccttttgtctttttccgtattccaacatgtaacgtaaaaacagcaggcaactggagatttatggcttgattcattctaattgatttcttggcttccttgggtctaattaattttttgctgtgtcccctaaaatggtacagcaggcttcctaaaagcttcaagcacacagctgcttcccagtttctgaacatctaaaacttggtaggtaaatagaaatcgattttgtttttgaaacccagacagaacagagggaaataggctgcagaatgcatcagaagaccacgaatgacatttatttcagttcgctaaggaggagactttgaggcaagacttgagtgcagttacttttggggagacagtgccaggaaacccttttgtgccttggaggagtgagagagggaacagaaatcacaaactgtgtgtgtttcaaggcagttgttcctgccctggcgagccaggcggtcttgggaattttctaggagatagtctgtgttttctgcttcaagccaaggaaggagtcaactgtggggcttatcctccagttccatcagtcatggttcaatggcttggggggtctgacactgacacccagtcttgagcctgatgtatcgggcagacaaagctatgagtgcttacgtttggcactgaggaggtgagtccgtgcagaaatggtaattgagcaaggtccatagacagcacagctcagtgtcctttacactgtctgaaggtaagctgtgctgctttgacctttttgtgcatcagtaatctgccctacctccccatgctgccctagcctcctgcttgttaccaccatctgtggaactgcaaaatctagaagacctttacattgacttggagaaactaaggcagctgtgcactttaaccccatttatgagggtttgaaatactggtatgtatcatagatatgagttgtatgcattataattataaattatagctgctggcaaggttaggcagactagaaagtgttcaaggctttccttcattcagttattctgaatccttcacaattaccagtcagtagcattttagtggggaggcggggtatgggaataaacgaatgcccagccaaactgaaaattgaatagaagcttattttgggcagtaatttttaatgggcttaaaatttaatctgcagagtgccacatttgtgtttctccttgttaggactgaaggaggaataaaagagtgtgttctgggccaacactgagttggctccatccagaccagtgcctacagggtcctagtgcctaccttcttgaatggagcccctcaagcatttctgtgagcttcctggcccagctgctattgcttaccttgtcctgctcatggggagaaaagcagaaggacaccactgtggtcaccaagcctagggtcaaggttcaagaaaggctgggggtctcctggggtcctcatttcatgttctcatgcagacttggctacttattagtctgttgccttaacattttccttagaagtcacaagcattggtagacttgccagatcagggcagtttcaggatctgtctcctgcttactctggtattttcagcatgtttgtgtgagattgctgttgctgcctatgaaggcagaaggcagctgggtatcttctccaaggtggcaggtccgcagtgacccagcttcctccttcaggtctcacccaataacgttcacctcctgctcttgctcttgacactttgtcccctgatgactcatgggtccttggaggaaaactcaagatctgaattgtatccttgtccctctgtcactatccctgtgaacctctgtgcttcttctccctgcatctcactatggcttttcctttagattacatatcatggtgttcacatgtgtcctacagtgttttaagcatctagtaaaccagtcttttctagctgtcataattttgctatgaatgggtcttgtttttacctccattttacagatatggaaacaagttaacacagtgatgattatgaaaataatattcagctggaggaaatataaaaatgagataatttttactttttgtgttctccttcgtccctttgtgtatctattccaagggctttggggatgtcttaaaatacacagtaaagggttgatttgcatgctcagaagattaagtgactccaaaagggaggaaatgctactgggcaaaaatagcattggcgatgtgttcagacacctcctaagctctgctctgtgttttcatgtgtataatcttctatggtgagtcaaaggatacaaatgttctagaacagattgactgaagaaaggaactttctaatcagctggcttgcaggataagcaggaatccttagggctccgtgaggagctgtgaatgaattgaagaggtttgacttgcttgctttgtcaatcctcagcatttcacataagacttcttaatcttaatgcctgataagatgtttatttattgccttgagggtgtgtgcaaggaacatttcatgaaagtatatcctaatggttaagaaaggaggcagagtctgtgtttgattctgagtctctatttgagtattgaatggtagtcagtcacataaagtatctggccttggattcatatctataaaatgaacacagtagaaagatggcaatacaaagatgccaatatgtcctaaggatgctctgaatgccagatgctcatgttattgtaaagccttgcccagtctgaagcactcttctgtggcattataaggcctgattctgtgactttgctgaaatcctttaactacactctgcaccatttgtttttccagaaaaatgaagtttataatgcttttctcacgacattaaattactatctatatgtaaaactcctgggggagcacctaaaatctttgcctgttatcatatgtctatccaagaacttagtacatagtagacacccaataaatattaaatatttgttaagcctgtaaaaaataaaccaacaaaaaaaaacagtattagtagctgcgacagcagagaacttttcacagtaaagtgttattatctgactgatatctggatatctgatgctgcttgacatgttgaggtgtagatggttgtcttcaggatgggggaaatggtggtttgcaagatagggtggggcaaagaaagagagctgtggacagctgcctcagtctcagacaagggctgcttttcttgcctaacttctgctgggtgtttaatcaagtgggctgagattgtgtctagccatgtatatgtgggtctctcctgctttccatctgtctctgtctgagtctgcctgtctctgtctgtgtcaacctgtctctggctttgtctttctctgtgtgtatctgtctgtctgtgtctctgtctctctttccttctaccacccgcacagtaaggactgagatcgtatgctggaggagtttccgatactgagcacctttagaggaagctttggaaaatgcactagcctttgcccatgctgttgttttgtttacaattttacacatgatgaggtgatcatatgtttttgtttctgctgatgtgcaagatgagggagatttaaaaaagtaatttccagtacaaaataatttctactcagcagtctatgctttattattgcaagttctttttcattacttggaaagaacttggataagattaagtgtatagacctatgtctctctgtatatctctgtgcaattatttacagatgcatgtatacatgtatgtaacattatgcaagatatacaaacatagatttatatgcatatatgagttgctgtgtatctatgtacagatatgtagaaatgaaggtaaaagtctccagtgtatgagtgtactgatgaacatatattctaaagtgtgctttgccatattcatagtaattcatagttcaattgccagagaatagctgtacattgacgttaaaaatacaaaaatagtatgggggaaagccactgaaagccatggtctcttaattgtttattgacaaaattcttgaaagagaacttgagaaaatgggggaaggcaattgaatgccaagtaataataatcatatccactgaaggatggctgagagtgagagcactgattgggaaaagaaagctttcttgggactctgtggatgttggaatcgctcacgcccagcagctatgagggattttaaagatgaagagtagacattctctcaggaattaaaaccaggaattttaccagaaggtttcagagggacaggttatcataaaatggcaaattctgtgcatcttgcagtaggttctgtgcctcgttggtcctaacctgaatgctgacatgtctgacttgcatttattttgctgtttagagttcctgttgactttgtaggatgtcctgatgctggtcttgcatgttgcatcatggtcccacaaaacgcctgttctgataagatgaagcaagaacttgaatcagatgcagagtttaggcaaacatcctttcaaggctcactgtgagtacaggagtgaagagcaagaaacgacatattttgcattcttattactcaagctatttcttcttttaagaaaatatcaccttggtcatatttctgatatttgtttttaagggaatgcatttaatctcaatgtactaaggaagacttattgaaggcatgaacatactgttccatttgggagtctagagcccaggattttgttttctctactttcaacatagaatgagacagtgtgacataaaaattccttggggaaatcaaaccttattttgcacttttttatgtgtgtgtgtgtgtttcctcagattataaaaaagagttgcatgtaaagattatttatttttaatttttagatgtatgcattgagcatttctttgatccaagcccttatgatgttataggacagaggaccttcaatggaatcgagcatgttaaaatacatgcgtgggcatgtttcacatgggcaattctacttatagtactatttatcaggaatatagagtcagtagattgtggtggtttgataaaaatggcccccatagcctgatgtgtttgcatgtttgtcccatagagaggcactattaggagttgtggctttgttggcataggtgttggagggagtatgggtaagatttaaggtttcatatgctcaagttattcccagtgtggacacagtctcttggtaccagctctcgtatgtagaactctcagctctttctccagcatcatgtctgcctgcatgctgccatgttctcctccatgatgaaatgaactaaacctctgaaactgtaagccagccctaatgaaatgttttcctttataaaagttgccatgataatgatgtctcttcacaacaatttaaagccctaactaggacatagatagatgcttgctagatagtagatagtttatgaatggaaaaaataaatggtagacaccatagatgctctagaatagagccaaaaggagtcagcagaggtaccccaagtactctggcaccttcacgcaccccattatgacagccatcactcacaatttctgtcctcgggcctctattctgtatttcctttctttcaggtatatctaatttttcagagggaagttcacttagactcttaagcagttttttctgcctagtacagtgaccaacacatagagattttcaagctaagcacctagttgttataccttaaaatactatcttgggtttgtttttaatgatgttacctgctttatcatgtgccttacatgcacatataaacatgcacaggctacttttaggaccagacccccttctattttcaacattcgcctcactgaaaggcatgccattcagggattggatagagatgtatatactttctactcccaaactcataccaccaaccctctctatgtctcctttgtagctatctattgacatctccacttacatattgctctcttaccctcattttaatcccatattctcttttttgagtaaattttatagcaaatctattatttctccaaccaggatgtataagagttacccactaatgtttcttagactgatgtttcctgtctgatccatcatcacgtttagttacttttatactgtaatgatacctagaattcttcaatttctctttgtttctatagaattttaaagtcaaagaatttccccctaactagcttctggtttctcagtgtgccacttggatgttaccttatatatcatccggctctccccacagcatggcgaaagtaggcacctgctgctcccagatgtagagaggttgggtttgctttggttgttctccaataagcttagttacatgcctgcgaatccatggcgaggggttggtctgaaatgacttcagctaggacgagcagggaggctcagctccctcctgtctcatcccacagaacacttgctgcataatatattccagagaggcagagagtataggtagagactccaattgctactcagttctctctcataccggttctaatatcccattggctgaaacatattatgttccttagctgggtctcagagagcagggaatatgctgatttcatagagagagacttggatatagggaagataatgaactgggactattaaagcctttagccttacacactaggtcaaaaaaaaactcctcctccaaccacagtattaaccttttctctttcactgctccatggacctcccttctctacaactgcacagctatttgggaggcattatttttaggcacttgggaaaggagctcccattgtttcataactgcaatgtgtagtacagtgcttggctcattgtaagtattcactaaaaatggactgaatatgagaaagaactgacagggatggcttcaagacataagtgatgtgtctttgctgtagcctcagggaagctatttactattataaagataagactttggtaaatatcaccagcatctacttcatttgaaagataccttgtcttcttaggcagtgctcgtggtatacatatgtacatacacacacacacacacatacacgcaaatacacatatatgtatatattacacttacactctcacacacacacacacacacagagagagagagagagagagagagagagagagagagagagagagagagagagaacttgtgccagagttgggggcagaagtctgtacaagagtatatacttcgagaaatttttttctgcctgttcctgtgagttagacttttggaagtacaggacccagtcataggagctgaaggaaccctactccatttctggaaattcaacatttaggaatgtaacttcagtaaatctatacccagctattgtgtactgtcgaattctttagtatccttttccctacaaaggacagcaatactatttgggaaactttcttacagctcaaataaaacaggccctttgcagagaagtaagtttgacgccccaaattcaagagtcacatcactttttctctattgtaaaacgtttgagagggggtttttgctataatttattaaaaaacaggaagccctgatgagtccatagtgcttccttttgtttctaaatagcaaatatcacattcatctttgcaagtatatgtgttgcctgaattcaaggaaaacgtggattctatgaggtaaatggagcatcagggatcagagacgtctctctcatgcaccattctgtttcccactcagtagacaaatgaaactccggctgccactgctgaagcactgcccccagcgcccttctgctcatgctgagtccaccatctgtaatcctctcacctgcccttcctgatagaccaggtctgcttcccatctagtcacggggtataaatttaaaatgttcattcgcttggcctcagtaaatccttgctgaaggatttgtcctaaggaaataaatggaattggtgcttgaggtggcgcagcctggaggttggcagaacttacatcaggagttgggatttggtatgaatgtggctttggtgcaagactacctagattccaataatggctctatcatttcctgacggcttgagcttggcacatcacttttccttttgccttgatggcttcataccaaaatagagataataatagcaactgcctcctacagttatcagcaagattaaaaatgtcaggaaaggtgatgcactttgcacagtgcctgatgcctgagaggaactcagtgttcatgtaagcacttgctcagccttcacatgtgattgcattatttaaaacgtctcattttctttttcttgcttccggtgctactagtagactgggtagaccccttcttatgttcccccaaacctctcacttagtatttttagctaggtttaatgcaaaatgaacaattggtggcttgccaacaaaaaataatggagattcttaaactaatttcttttataaagaaacacatgccagttctctaatttgggaaactattccatttgtatgatagcatctgctgatctcatgacaattattcaacactctggcactcaataatgagggccaaagatgtggccaattgaagtcaacttcaattcaattttaaatagactacttgatttggtcaaaaattagccttttaattttactttatctgatgtcaatgttgtattttggctacttaaatctttggttttcagttagaaatgtatcagagaggttccaatgtcttgtcatcctgtgttagactatacatgtctagtttttcctctaattacagagtgttcagagcactggagtttgaattgattatagggcacatgctgtggtgcactttgcagtttttataattttaatttattaacatgccttttatttaatcacgtataagttttaagtaaaagcttgggcccttcttatcttctaagaaataatttcattatcaagtattatgccataattaatgtattatctcggcattgcagtagagctttctggatcctgggagccagtcttggaagaaggagatccaagataatgtagaaaaaaataaaagcacaacagcctatatcagctacactcactgccctgctgtgagatagggatcagcttcaaattgttgcactcacagaggatggtggtctctagcaagaggatggtggcagcaaggagtagcctatcctgataaaggcagagttgaatccatctgatatcctacgtgtgtccctgaaatagacggtctgctctcaggagcagctcttgaatacataagaaaaaaaaatctggggcaaaagaaagcttcctgttccctctttgttatgttatcctttatagagacctggggtttcaaagtaaaggtcgtgattttcttcccctatttgccttcctggcaagggttgcttcaaactcttgacattctcaaaagtgcctgtacttacctttctgagcagatggaggctacaaggatgccacagagacacatagaggctttcaaaggcatagaagtgcgagaaatcagagaaatccatgggtgatatgccctctgttaaacacaaagcttattaggtggaataatgccctcaacttaagtgacttgttagaaatcttcatattcacgatgtactatttctttcagaaaatgactatcatggcaaatgaatatcatgacaaaagtgatggtaaaacaattaatcattgaaaatattagtttttgcctgttcaaattggccaattctgtctcatctaggtatacatttctttttcccttttggtaaaatcagcaggaacttccaggtggctgaaatccatcccgagtattgttgccaggaacatttatagtccattgttcagaacagaatagctgggagcaacagggggctcttcaattttgcctcatcgagccccaaattggagatgtgttttttgtcgcttcagaatttcaggtgttagggcctgagattcaaaacaaataccagctcctgctgaacacaagccttaattaattttcagcaggagatgagtgattgccaataagccatgaattaaaatggaacggtcaccaaaggccaggttctcctctcaaacaaataacatttcttactgattccttgaaagatcatctcagaggtgagcaagtgcttgtcccagctctctggaacgagggaggtgtgtgggcaattgagagcacaaagtcctagcctagtagatcagaggacccaacccaacccaacggactcggaggcacttgggcaatgtcctcatcacgaggccgtagttctagagcgtttgcctgcttctctggcttaattatgtcagtctccagaagatcttaaaggtcagctgtgccccctatagtcagtgtctgtggtgcattggggccacctctgtaaattggaaattggtactgcctcaattcctctagtcacctccatattcccttttttcagaaacagtctgtgttgtctctgtcctattggctagttttcttttcttttttaagaagactaaagaaagagagagtcccatgttgttttaatcctttgagactgatttatccccaaaggtggaacacaatgaatcaaaagtctccttgtgtgagaaagctctttaataagtgagattgctggtctcaagcttcttcttggggcctattttatgggcaaaacaacccagagcctttcaaaattctttacttggcactgtgtgtatgtgtgtgtgggggggtgggtatgtgtgtgtgtgtgtgtgtgtgtttctactcatccttgtatacacaattattattgtcatcattgttgttatttaataacaaatagccactcattgtggagtgttctattgtggtataaaaagttgctagtgtttatacaatcctcagcaacaatcttataaattgagtggttggcacgtcctaccctatcaatgaggcattttataaaaaagggaaacagggattggtcctttgcccattagactcagaattgagaatcctcactcttttgtgatggttcaacacttccctcacccttccggaaagcatcagcccattgacaattacttgagggaagctgctattttcctcacatactctaaatgggagatgcattggatttctaaaagtgctgtgctgattgatcctctccacactcaacaaacattagcaaccctgtttccctgccgagaagcccgctcaaggtggtaaaagcataagcattgcctaggcaccaggccttgggtccagatgcttctggggcaaaaccatcttcttccagttcatcatgagagctgatgccagcttctggcgtatgccagcttatggtgaatgaatgaagtccaagtccaattcctgttatgtcagccttattgtctacagctattgccctctagtggtgtgaacgaaaggaaaaatgaggttggatttatggtttgacttgccctaacaggccaaagttctacatagtggtgtttacatatcttcctcaagggcagggccctggtcctgtatcaggtgcagtgtcaactcagcttttagtaactggtggaattacacatgcaaatatagatgctcatttccgtgcctgggtagcagctagcctttgttttcatagacaggcatacaaggcaaccaatggagtttgcagggtctgttttcagtctgccaaagtaaattaagtcaaaggacatcatttctctcctgataataagcaactgtggactgtgagaccagagctccagatagtcagtttcagaggatctgaaggcctgcataggtagggatgttgttgttgtagatttagacatggttctttacctcttatctctagtgatttatcttaagtcctctaagtagcagaggcagtaggcttgtgccgccataccatgccttaggcctgttctttgggatccaactctgatgaaactttaatgtgctgcatttaaggccttcttcttctttttttcccttcccaattttttattagatattttcttcatttacatttcaaatgctatcccgaaagtcccctataccctccccacccctgctaccctacccacgcactcccacttcttggccctggtgttcctctgtactggggcatataaagtttgcaagacctaggggcctctctttccagtgatggccgagtaggccatcttctgctacatatgcagctagagacaagagctccagatatactggttagttcatattgttgttccacctatagggttgcaggccccttctgctccttgggtacgttctctagctcctccattgggggccctgtgtttcatccaatagctgactatgagcacccacttctgtgtttgccaggcactgccataacctcacaagagacagctatatcaggatcctttcagcaaaatcttgctggcgtatgcaatagtgtctgggtttggtggctgattatgggatggacccctgggtgcagcagtctctggatggtccatcctttcatcgcagctccaaactttgtctctgtaactccttccatgggtgttttgttctcaattctaagaaggggtgaagtgtccacactttggtcttcgttcttcttgactttcatgtgttttgcaaattgtatcttgggtagtctaagtttctgggctaatatccacttatcagtgagtccatatcatgtgagttcttttgtgattgggttacctcactcaggatggtatcctccagatccatccatttgcctaggaatttcataaatccattgtttttaatagctgagtagtacttcattgtgtaaatgtaccacattttctgtatccattcatctgttgagggacatctgggttctttccagattctggctattataaatagggctgctatgaacatagtggagcattgttgacagtttaggagctgccagaggatgctaaacccataaaccattcctattatggaatatactctctattggttatcaccccactgagattagatgtagggaatagtgttctgttagagaaggaaaacagaagagagcaaagtatggacaggctcagtgtttctacaaatcttcagccttttcctctctgttttcaatggatttattatggctaatggtgccagttccaccagtgaagccatgtaggacaagtaccccagaaattccacattcagggcactgggcatggcaggctgtgaagtctcctgcacatatcctgtcttatatacttggtgcttttgttaaattctttcaagtttcaaatgaattatcaacctgttattcactgtgtccaagccccataatgtgtgtgatccttagtcttaccacctgtaaagtggaattaataatagtttttatggattatcttgatgtctctacgatgatcagccaaaagctagccacagtaaatgttctatgaaataagacaatgctgaacttactgctgtttgcttagcaggttagaggttatttggaaagtacacaaagacctttttttggcatactttcccctgcaattttctaagtggagagtttaagacatattttaacagagctaaataaattcttgatctggaagcacaggtagagccatgaaatgttacaatcatgaaagaactctgttgcaatttgcaaagcattaaccaaatccccaagaatgagcctagaaccatgcacatttctaacaaggcagcttggagtgttcagacacatctttatttcttcagctcatttacaaatacttatctgtgatttaaatcactccaatggaagcagagactcaatggaagcagagcagaactaagtgtttccaactgtcggtctggtgagggatgaggtaaagtgggacatttagctggcatcctgcatgctcgctaaatagaattagcagaagcttccacatttcaatgtctaaaaatagtgttgcttttaaaggaaacatgcccaagacctgagggtgggtctgggagttaggtgtacatggtgggtgcagaaggggacatctgcgggtcaattaaatgtctcgggggctctagattcaatgctaattggttccatcaaaactaatcacaagtaaccttctctgtctgcagtcagcatcaaatgaatcctggtagggttgggctcagcagagggccgcatgtctgatgaatggagcagttggttgattctctcaagttcataactggaatcacctgtaaacacccggctacttcttttcctagtggaaacaatatttcagtgctaatgaggggtttgatttgtttttagtccagtggtttcccattgttaatcattaattgtgctgttacttaagaacaggtctgattaatgcttgatggtttccttctccagggctcctttgagcttttgttagaggagactttaaaggtcagaatggttaatccagaaacgttgtactcctgtcaaacacgcaaaatctaccgctgattcatacaaagggacttatttcagaggagagacaatgatttgataactgtcaaattcttttttttgagcaaaacatttacttgtaatttatcacttaagaaacaggtctataagacttagccagaggatttatgttgtttgcaaaaaattaactaacttagttctcatagtgaccatgagggaagcattgtgaatagacccattttacagataaaaaaataattaaaatacaggaggttctgtagttccccaaatatcatataattaaatgtggaaggggtagaattttaatccacatgggcccatgaacttctaatgagctttgccaagaattgttaagttatatttgttatttatgaataatgataataatattaaaatctgccaacattatcttcattctccccttatatctaatagatatgagctaatggattcctcctttgtaatggtgaaaggtatcaaatatgtttattaatcttttcaattagtatgggaaataatgggttttactatgatattgtcattcatttgtttttgtccaccactgctatcttttgtcactcctccatttcccactgtcccctttaaaaattaaagtccagtagaattaaatatacatatatatcatagttgagtcagaaaccaagtattattgagaccaatcattataagtagtttccgtttaatcactgactattgtggtgagaaaactatttattttaactcctttatctactatggaggtgaaggctcttaggtggatcaggaaatgtgtctgtaccagggtcacaggtccctttggtgaccgtgctcatgagcacaaggctccctgttttgaattaatctatttcctgaaacagctttagaagtcaccagctagaagataggccaagcatgtcaagtaagcctaaggatgtcccactgggaggagtaagagttggtagagtgaatattgacttctttggaaggaagccatttgtgttcttaaatggcaaatgcttgataggtattacccaggtttgtattgtgcaactaatgattacttagttaaaaggatcaataatgagtttccttatttataagtaattgagttgagttatcttctaggataaacctgtcaggtacccaagcttaaaaacaaaaatcaaatgacaaaagaatctttaacagttcatactaagaaaatgctgggatggaacacagtgaagtctcctttccagtccttttcagagagaggatgaggggaaagagcttaaggtatgttcaggggcttcactgccaatctggctcagtattcaatgacaccttgccttggctggtccaaggctctcctctccagacatctgtggctttgcaaagagtccaagtgctccccagctgtcttggaaaggtcattggtagtacaggaagtttgacatgtgtatgtatattgagttattgtgaagtgtccacatagactggacaaatatggaagatctttagagtagaataactggatggtggggtgctcactaaccagggtccctcggactttcttggtctcactgcagctcttagctactctcagtgaatcagggttctttgggcattaggaacctcttgatttagtaggacctatggaactctatattaataatgtattgtttctgttgtgttatagtagtaaatttgattatggtaaaatgaatgacttttttgtatagttcagtgttgatatgtgtactagtgacatcatccttcccaccaaaagaagaacatgttaatcaccctagaagtctatgcacacctttgcaggtagagccactgtgccctagattaagacatccatttctatcatcagatgtagtgttgaatttcataatgacattcagaggtgattatgatcacacaaagagaactggggataaaaagtattcctacagtcatgtacctgacacagaaacacatttactttgttatttggatagatatgtatacacttttaagacttctaaaattatgtttactgtaactgtaagatcgctgagtgatacacttggatatctgtgttgtaaataagcaagggtttgctagttggggtcacaaatgaaacttagaagccccaggatgatctagtagtccacagaagtgtcaagctgcagactcttagttgagaattaaaagaggccacagagtgagtagcaggctgggtccataatcctgttgacaacacttttcttcagcttttgattcatagtgcatctgttccccaccagttgccctgagcccagcagtgttgccctggtttccatggtgctgatttgcatatgaaactgggacttggatttttgtgtttgcctcacacatttccagtgctaagtgttcttctaagaaagggattatcacactaaccagttaagggagtttgccagaaataaagcacccagggaattattcttcaggttgtattgtggctgctgtgtctaagagatcaaggcaggttgttgggcttctgaggccagcaaaaggccctaaagataaaatgtttattgtaggtctgtagcatattgtcttccttcctttcttccttccttgcttccttccaaccttccttccttcttttaaactatatttgaaatttaaaataatgttgttttgaaagaaacgatgcacattattatattagcattttaatcagcttcaagtagccgaaccaaagcttaaaatttgtgattctacatctgcccccaaggaatcctatgtagcaacatgaaagagtgaagtctgatatttacagccttgggtgtccttctaaaacatgatgctgaggaggtaagcttatacatcttatatttgcatgaatttggaaacaaacaaaattaatctgtagtatctaaagaaatcctggttgcttcaggcccgagattgactaagaacatgggggccctccaggtcatgcagataacccacatgttagtagggtgtgcataatgtgagtgcttctatcaaaattcacaaatgtatactaaaatatctatatttgtaccacatcaacacttgtaaaagtaaaatactttgttatgaagtcaattattaaaaaaaaaaccctgaaaacagataaaagtgaattggcctttattggtcttacagcagtttcatctacaatgttagatatttgagtgggtatatctattctgttacagtgcatatttgcgagcctcaggatccctctgagactatgtctggtctagaaagcattgcattcatttatagttttctgcaatcagtgggagcttgattgagttagaaagcgtaccatttgaatttcactgtgatctatcttcctttttagaaatgagaggagagacgtacttaactgtgtttgattgagtgacagttgatagatcttgtttctcagtgtgaggctaggtttaatctctattaaatgcacatgtcacttctcagatgctggctggcttgatgatttgaaaggacctcgggtaataagcaaatatttctatgactctagagtcactgtttgctcttagcaggacctaggtttttctcagttgccacttatacttggctagggagctgaagacagtcaaattctaaggccactagctgatgatctagttgatgccctaagtctgtgattaatctatattgtattcttggcagaaacacataattacaaatgagggattggattgtgccctcaggaggaacgtgagtccctgatctatacccacagtgccagttcgctgcttagttggtgccttctgtggacaaggtacagtgatttggaggtgacccttgctctttgtagaattttgaagtgtttgagagggtgcttaacctctactccagcatgacttttctttaaagcagaatgcaacacatttttttcggatcagaaaatgcaacagcagagaccagtgccgtttatgtctttgaaaaatgtgctatatagcagctgtcccaagatgtaccaactagctcagggatggatggctcatatcatgtgctgggctccgggatgctcttccggatggccagtgtaactgttgcttcactgcttccaatgctcctgcaggtctcttgtgtcccagcctaatgagaaactctcagaactcgtttcgcctaaatactaaagagtcaccgtaccttgctgatcatgacattcaactggagaaaattatcctggaaaccagaaggtctatcaggcaaactcgggttattgacaggctaagaacatttgtcagggcactggatttcttcttcaaagagaaagaaatatctccctcttcccagagtcattagatataagctcccccttttctgtttcagactgtagtctctcatataacaaaaaggggtgtgtggaatccttcttatccttgaaggtcatgttcagctcttattttgtccttttccactcccattaaatttcttgtctccaagtcttgcttaccctgtttcctctgattctggaccaaggcagcctgctaagcctgcaagaacaccaggcaggcaaagggagtctgaatgtttgcctaaactctctgagctgttaaagtgaaacactgagggcaaaggctaactgcaagtgatggaattaaatatttaccatgttagccatgaccactcaggggtttcaggaaaagctaaccatattgcatggagttttttctcctgctttccagatgatatccagtctcgagtaaatttgccagctctcggggaacgctattcagcaacattaatttctttgcctacttacagtttcaagcaattataatcttggcagtttcacctgccttgagtaagaacttgtacactttgttgatatctggcagaactaacactctcctgcaaagacttacgtttcaatactgctaattctacaaggcacttgagctgtggattagcgttttatggacatttgggccaaagttttattactcaattgtctcaaatggaaaaatatatttaaaaaaaaaacaagacatttggggtttgtgttcttttttcaatgcccttattaagttagttggttttgtaaggtgctaggtattggaacactaactcatattggatactccgctgtagaaattgacataatgagtattgacttggggctcaaccttctttaggaagaaccatgtcagctcagagctcctaagagggtggcaggtacattttcagtgactgtattataatctcacttctttttctcgttttttcacttcccttccccctctcctctttagcctccctcccccttttcctcttcccatttctaccctccccttcctagccctcctctttttctctattcccctcacattccttctctttttttatttctccattgcctttattttccttccattcctttctaactgatctcacatttatcccctaacaaatgcctttgtacagatctttgcctcacagtgtatctatctccccaaggttcttaaaaaccatagctgtgattacatgaagataacaaagtttgagggaaagaaagagattggaagctactgatgaactcttaggaccagggaaatggagtttctgttttcctccccacattggtcttgttgggaggatgaaggcagctcattgtccccaggccctgctggggacataagcactctcttttccctccccttttctatgtcttatgttatgtgatttgctagcatgttatatgtcacaatacccatgtttactctctgtctacatccactgcttctcccatacacacacagacacagacacagacacacacacacacagacacacacagacacacacacacacacacacacacacacacacacagagacacacacacacacacacacacacacacacacacacacacacacacagagtacataaacccaggaagaaaaagatccttgtttactttcagtgatgtgtttagcacatagtaggtcttagtaagtattaaataaatgaaggagagaagtcaaagggcaagcagacactgggtaactgtgacatgcaagtccttttaacaactggagagtttcaaagtgggagaaatgttgagtggatggagatttaagggtttggagaaaactaatacaccgaaatgctttgaaaacacaattttcatattcgaggctgtgtcagattctcttagagagcttgttaaacaaaatcactggcctcactgtcagagtgtctaattctgcaggttctcttatccgttattagtttttgaagcaatttcaagtctccatggttggtgatgccgggtggctcttactatgcatacacaggtgatctcctagcaagtgcttgttccaagttagtactcaggggggcaagcgcatgctgggtaaatacccttattccccaaacaccattcagccctgaagctgagggactcacagagctttagtgttaggaaatgaaagcttaacctccaagggcttctagcccctgctagtgcagacttgatgaggagagctgagctccacatgcaagccagcttcttcctaagcttgtcagtgtgactgagcctgtgatctcttttggcacattcttttcccaatcataacttgtccatcttgctacaatttcataagcttttgtgatactttgttcatcatgaaaatgtggcataaaatgtacagttattgactagcctgtccaccagtccttttagtttaaaacattccttgttattgcttactgtggcctctcgggcattttcagtgatgttttctttccatttagattcttttaggggcactttattttctttatgtcttgctttgaaacttatcaagcaccgcagtttccaaatgagaagacatagaccagtagtgagcttggcattcacaaggaaaatggtaatggtagtcaaagtttgcttttctccagccttgtctccaaatatatcctagtgtataggtaattctgttaaaaaagaaaaagaaataaactaagaaagaaagaaaagaaaatgtttaaacccgttgagtccaatgtgtattacttaactactcttcagagtggagtctgccttggagtataaccaacctattagaagtcactttaaaagaaacaggctctacctttcccagtagctgttaagtgccaatagctcctcagctagtgatggaatttcatgtccacttccaccttcacttctatgctagatttgtgtggtgtgatcttgtgccggtcttgtagctggctgtcacaatcactgtgagttcctatggatagctgacctgtatgtctggaaaacagtgacttttttttaagtcctttaacttctctggctcttataatatttcaactctgtcttccatgaagatctctgagcctgttggggaaaggtattctgggtatgtttcatttagggctgagcactctacagacttgtattctctgtatgttgaccacctaagggtgtctgtgttaagcatcatctacagcaagaagcttctctggtgatagttgagagatgtcctgatcaatggggttagcaacaagtcattagaagtcatgttaatattatgactgcctagcagaataaagagtatttgttattcccatagggcctattacctatccagacataggtaatgttaatagtgtcaggtatgggtttcctcattcaggctttacatcttatcagactataggtggttacttccatgccatccatttcattattatatcagtgaccttatctgtttaggccaatcagattgcaggattcaaggctggatgagattgatagttatttttcacctcaaaagataggtctgggaatgcctgcatcgtgagtccagctcgtgttgaaaccttacctccattgatgcattagttctttgttgccaaggcaatgttgcttaaagcattgttccagtcccagtggtttaagacactaagcccttacttagttcacatatgtgaatgtcggagatctcattggattgtctgggcagttggctcttctggttcggtttacttatatgccaagcagtaagttggttgtaatgacagagtaactggttcagtgtcctctagggggtcatccacagcttgttcacacagtggctgaccagggcaaccagagagagagagagagagaggaagaaaataagcctactagacttttaggctcatcatgacatactgtcatttccggtgcccttttctcaaagccagacttaagaggacaaaagctagactccagttgtctgtgccctttttggagacagattttcaccatctgcagtctagacttgcctgaaattagcaacttctcccatctcagcttccgagtggtggggtttcaggcatgtcctgctacagtgggttatagtctactgtttaaaggcaaagcatattggtagacagaggtgttagctgctgttcctgcagtacacatggtagttttaaagatgtctctgggcaattttttccacccctaaatatggatggaagagtttacattttgtttattcttatagtgactcatgtacagctataatttgtagctctaaattattgttcacttcattcaaatcaatttgcgggtatagatcagtacactgtcgatacactacaatatagtaaagtaaggacaggtttaaaagcattgccacctttttttttgtggatcaaatatgatagtggtgataatggcgagactgtagagaaggagttcagcttctctttgtgctcaaatctgacatcatttcagtatgtgccaagggataaagaaacatgcttctccatatgtcacattgtgttactattaaataagtgtgtctctcacattagtagctttcatagcgatggtgacacatgcgcacacgactgtgactattgcctgtgatacatctgagaccatatctgagagctgttagaacttctgagtattttttgcccagccaactgttttgaaggattcccttctatgacacatccgttttgcaaggaggaactgtgcattaaaagaacattgtaaataagcaaccataagtgtcataaaagtatgttagctcacaggggaaacttgagtatcctactcaaagttagccattaatatatgacaatggtgtggtttgtcctgaatttgacagctccaggctcagagccagaagccactggtaagagcaattctggcttcttctctgtatgtcatttcttggggaaaccaagccacaacctgcatatctctctaacgctatttttaatctagctctagctttgtcttgacacttacccagtcagtatctagagactccatcttcgtgtctattcaggtgtcaaggagtacaaagtaattttttatgaaaagatttgtcaaaatattaaaattaaaagcatttaatattttgatcatatcagtgtgtgttatgtgtatgtgtgtgttatgtattcattacatacaacattgtgttgcatctttattcaaacttatacttaatgttaacaaaacaaaacaaacaaataaacaaacaaacaaaaaaacagtgaaacaaagaggaaaaaaatgccaagaggaaaattagaaggaaacgagaagaagacagggagaaaagcaaaggagagaagaggagacgaggaagggaaaatggcttctggtattctctgctgccttcaaagtttagcttgtccacttaccatgcgtctgtgaaaattaagtctaaataagttgtgtagctacaagctgttcctatggagtttgaaaacagtggaggacactgctaacgagtcacagagcttttctctgaggaggcctttatttgggtgagtgttttgtttttgtgtttttgttttctgtagcaaaatggaaacatgtgagaaaaaaaatcttgatttgacacagattttaatctgtggtctgctttgcctgtaccattttgtcattcatgaaataccttacttttatgttctaagtacttaataaacctatcaatgctggtccctcctaaaaatgtttgtttccttcctttctgtttggtatatggtaatgaaaattagcttttgaaaaaagtattgctgctgccctaaagactagtagggataataaagaaactggaggggtcatacaggccttgtgattgaaaaaggcacctcctgatagagagggttgaggttccttaaatattttatcaggatgttgtaggtttcaaagccacctatgaagagttccttggtatactattaacaacaaagatgaaggtttcaataacagttggcctaaaactgtgtcccccaaatcttcagaacatttctcaaatcagtgtgaagcccaattaaaagacttccacaatatgtccttgtcctgggaatgtgtgcaggaggcatgtgtgccctgcagcagatgtgccttgccctctgaatctccctcgacatctaagatgtgccactagcttctggttgcttgctgtgttgtctcctctggaatgctcacagtcaggcactggctgcctgagctcctcaggaatgaatgccctggagcagctcttgaccagttacagatgggatctgctagaaaggttccttaagtgtctcagcttttatttgggggtagatctgaggcacacttttctcagtttcccaatgagaatgcactcctatgactgtgtatcattattcatttattgcatgttccattctggcttttttccattccccaccttttatttctacataccttcagttcttcctgggactgcatcactcagatgaactccgtatttccagcccttatttgtgcatgaattctttggaagatccaataggagccatctgctataacattctcagtattaaattccaaggccacctgtattactgtgttgtatttttctgcaattgtggtctttgttctgtcaatcctcacgtattccagcccacagcattacaaggtcatgaagccccccttttataaggtcaagttctttgtatgctagcctaggaataatgtataaaataagaaagaaataagttggtacgatatagcactagaatcataatagtgtttggaaatgaaaaacaaagtaagtcattcattgaattccaagatagaagatagcgacaataacagaaaaaacatatgagagatagtccacaggtctttttaaatcactgctttacaggccttagaccagcagaaggaaactagaaaaaatatcaaattatccacaagtctcctttatttgttagattgggcagctaacttggttgtcagagggttgagagttagctgctactgaccagatctgttgaattgtgtggggcgagctgcatgtcagggtttgacagaactgacataaaaaatatacctcacagcgtgttctcattgagaggagcctctctattcagtagagaggcatagccttttcaagtgctgtcagatcccctctgtcagaagggaagagtttctagtcaaagccagttaattcacatagtctcacctgggatttttaaaaatgtatttattcactttacatcccaatagcagcccgggtccctctgttccacctttgcaaacctcccccctccccccattatcccctttgcttctcctgaaagaagggaaagaccccttgggtaccaccccaccctgggacatccagtcccagcaagactaagtacctcttctcccactgaggcccaaccaagcagtccagtaaggagaaaggaatcccgtgggcaggcgacagggttagagacgacactccatcctatgttaggggacccacaggaagaacaagctatatatctgctacaaatgtgtaggttgcctatatctagcccctgcatgttctttggttgatcattcagtctctctgagtctctataagcccaggttagttgactctgtagatattcttgtggtgtccttggtccctcaggtttgttcagttctattccccactcttccctacgactccccagctctgcctgatgtatggttgtgggtctccgcatctctttccatctgctgctggctgaagcttctcaagagacacttatgctaggtccctgtctatacgcatagcacagtatcattaatagtgctgggtgggctctctcacatggctctttcaagttgggccagtcattagttggctgttccttcagtctctactccatctttatcactgtgcatcttgtaggcaggacaaattttgggttggaggttgtcttgatgggttgacctccctctccctccactagaagtcttgcctggttataggaggtgcccacttgagtctccatatccccctctggtatgaatctcagctagggtcattcccatatcctcttaggagcctcctgtcccacagatgccttccccctccctaccaatttccttctgcctccccaccaatttcctttctcactcccagccctctctagctccacctctccccacacctgatacccaaacttatctccccacctcattccctttctccacccacctctgatgagtatattgtttctccttctgagtgagactcatacatcctcccttgagctcttattatttagttcctttgggtctgtggattgtagctttatggctaatgtgcatttataagtgagtacatacataccatacatgtctttctgggtttgagttacctcattcaggaagatagtttttggttccacccattttcctataaatttcatgttgtcctggtttttaatagctaaacagaattccattgtgttgatgtaccacatcttcagttgtttccagtttcgggctattacaaattaaactgctatgaacatatttgagcaagtgtctatccaacctgggatttgaaccctgtactttgttgaacacacatttgtaaaatttggctattctctgtatggtatagtcaacaatagcttgagtatatagactaccattacatttgagaaaattcacatgaacagtattttgttctgaggatgttttatttcataaacaccataaaatgtttattgaataaaagggacattataaagtgtcacttgggaaatgcaccataatctagccttctttgatatggagaatccaaaagtagggatctatgaatgagaaattcctgggtgacctgaaacggacatattaggattgtggttgaaagagaataagaattgatttcccccaaggtatgcgtgcccttcctacaccctctgggttcttctcctgtgctgcttgttgtagttgtagttcataggcatcataacacaccatgtcagttctggggatcacccagggtctctggaagaacactacccagtgtttaagtcaactctctagttccctgattacattttcagtctgcagaagcttgaatcagtgtaagctgaacctatagaaatggacacacacacacacacacacacacacacacacagagagagagagagagagagagagagagagagagagagagagagataggtttccaggtacttttcttgttgaactttacatttaaactgaagtttgctcctaaaattatcatggcacatactggtcagcaagtcttcattagagtaaatataagttgtcagggaggctgaaaggcaagactaatgtgaagccaaacagtaaagtccctgaaataaagacttcaaactccagatcagtcatctaagttagctagtcagggcatattctgagcaagagtgtgtcaggattcaagtccaatgctttcaaagaggagcttaacattccaatctacattctagaacacttttgagtaaattcaagagatgattgtttggggttgcagtcatcccataatgtcatcaaacttatgttttcactagaatattttaaaacattttagaaataaatatttcatttaaaaattcaagttatctgtgagtataacaactttgccaccaatagacctttaattcatagtttatccagaaattctagagtcaagcactgatttgatattaatgtgattatttctgtgttctagttactagcctaggaaatgtttatgtattaacccttgcaatccatttggtgattgcacatattttaaaagtatggcttgagagggttaagtaccatgcctaaggccacgaatacatgatttggggtactttggacttgaacagtccctatgtttaatgttgatgcttttgaatataattaagactcccctttctagctgttctgaagcagttctgtggaaagcagggggcaagaagaagcaatgttgaatgtgttaagaatttggtagaatgttcaggaagtaccagaaaagctcaaagggtgaaaggtttccttttgcctgggggatttggaactccatagaggacagcacccttgaccttactggagaggccattgcccactgacaatgttgtttccaggagagaccatatcttaaaatactttaaacattatatgaagctacaagtctttccacccacttccccaatctacttaagagtacttaaagtttatgttttcaaaagagacttgcccttcatggttgtctaagtaaatattttactctctgttaagtgtttctccttggaagtgtaaatatctgctgttatatccccaggagtctctctgaattaaaaaaaaatctctctttccaattcttctaggtctttgtactcagttcagttccctaggaaattatgtagtatatacagatttccatacacaataatataaagttacttgggcagttttacttttgcgttgttgctcatttgcctggctcattaatgcttgtccatgccatgggggaaaagatcctggcatttgaaagtttgcattccagtccagtgcctactgctccagggagtggcactgaaggtcagtgggtcggccatgcatctccaacggttcttatgctgtctaggaatgctacatactgctttcctttacccctagtttacatagtctttaaaaatacttacttattcttatgacttaaaaatgttcatattgctatctgcttcttcagtaagtttcgcaggccacttaccttaattattaagctatggaataggaggtgtccaaatgcttatctaaccatgtcttttgactgagtcattcacaatgtttttttcctgttatattttaaaaaggaaaaaaaagtgtaatatcctttcttttaaatgaagtcaagattatagttttatttttttttaatttattttcgtgagtttccaaaggttttgagacatataaaagcctgagagaaaaccgtgaaacaaatggtaatgtttgcagactaatgataggctgttacacagggataagaaaaaaaataacccaaacaaagtgggaggattatttcttttacattttaagttctgaaccagtgggcaacttaagaagaccctataccatataattgtctgcatacccagatttgtttttcattgttcaacaagatgccagagagttcacatggctgcttatgtgttgcaacacccaccatgctggattcctatagcaagaaggtagaaacagaggcacttcatttcttattaagaatctgacacagaattttgtacattaaggaagcatgtggccggttgaccagaattaagtttaaatgcttgtgcttatctggaagggcagctgggaaatttgactttgtaaacttagagtcctaccagctctgaacggctcttactgaagagacaaaagaaatgtggctgccagagaacaatgcccccacctcctgcttggaaggcagcctgtcacagttaagcacgaaggataccaggatccttccagttttagtgcatggcaattttctatgccaaatttttaattaacttgtgcttcacttatgccctaaggtatttctgttgattttctagctggacattcatttcatacattgttgaataattgtattgtcttctgctattgaccatgatcctgattatctttagtttattgcacaaactcaagtgcctgtacccagttcaatatgtacatatacatatacatgtatgtaggtaggtacacacacacacacacacacacacacacacacacacacatatatttatatttatacatatctgtccattaatgattatatatgtgtctgtagaagagcacatacaaatacataaaaatgtgactggaataatttttttagtctcttgttaagtctcttgtttttcctcttatcttgctgctccttaatcatagcttaaatctgaagtgtgctgtttctttttttttttttccttttccattttttattaggtatttagctcatttacatttccaatgctataccaaaagtcccccatacccacccacccccactcccctgcccacccactccccctttttggccctggcgttcccctgtactggggcatataaagtttgcaagtccaatgggcctctctttccagtgatggccgactaggccatcttttgatacatatgcagctagagtcaagagctccggggtactggttagttcataatgttgttccacctatagggttgcagatccctttagctccttggctactttctctagctcctccattgggagccctgtgatccatccaatagctgactgtgagcatccacttctgtgtttgctaggccccggcatagtctcacaagagacagctacatctgggtcctttcgataaaatcttgctagtgtatgcaatggtgtcagcgtttaagtgtgctgtttctatagggtgcttaaaatggagataaggggcagatgcaggaaatttttgtgtctatggccagttttcccatcactctgttggattttcttataggtgcaagctcatgaaaagctataattctgagcattcattataataatacctgctattggcagtctcatccagggaccatcgagaatgcaaggttcacataaggaggctactcattacttaagtgtttaattttgaatgtctaaagtaccaaaagctaattctatatttctctatttttaatctatgttccataaatgagaaactttcacaactagagttaataggtgttcttagcaaaaaactcaaaccccagcatctctcaagggtccctttcaaattttctttgtaatctctgccagatgtacttgggaagttgtaggaagcctctcatcaagagatgctcagtcttcgagtggacagtgttttgtccttcctgtcaaacctgaaggctttacccagtacattgtagctttggtttctttctcacctgttcctggaattgaagtagctcagtgtctcagctgcctgaggatttccagcttcagtctctcgtgaaaaccatcagttgaccatgactgtgtgtggctttagggggtttgctgagtccatttgtgcagtatttggagctatgcgcttcatgctctgagttgaagcttcccatagtttaagtaacttcttaaaggtcttgtgttctgtgtctcaatgaaatcagctgtgcagcagagatgtgtattaaagtaagcactacttagctattgggaaagcacttctttggccagcccacttcttataaatatggccttattttgccactgaaaatgagaaaataggtaggtagcgggcaggtctcacagtataattatctcttggggcaaaactcacaaaagtaaagatctaattctacatcttctattggggtcagggaagacagaaaccatactgtctttaaatgaaggtaatcagtgactataaaccaatattatctctttaatttcttctcatgcccaaggccttattttcagtaaacactagtgcattaactcaattgattattatagaaaacaaaaggtgaagattttatattttaggtggaaagatgaagtgtggagaggttattaacatgaatcaagactcatggctttaactaataaaggggaaatttaacttaataagatggtctagttcgagagcctatatccttccatctctcaaaaagagatgtggttttatggaatgttgcctgtgagtgctcagagagctgcaactcttcgccacagaatacacatgctgtcctgatgctgaggtccagtgggctttcactaagtgctagagctcacttcctgcccaagctccattgcttaggttgcacggcagcagcagtattagctgctcagtatacagcattgcttagtatacagcttgccctctcagtgaggaagccctgctgaatgggcatgaccttgtggaggtttcctttgctgaagaagaggttgtgtagaattcctccctgcagagtcaggggagtattttacaaatctgagttgaagtctgacgtactggcgtgctctagacccgaaaggtgatttctgaatattttggtagagtttgttacttgttggctagaaggagtataagtgataactctgctagcagcatcttgggtttgctgtgcataaagctttggtggaaaataaaatgtactgcaaaggagagaggtagggagcgagatatcatctttgtcagtagactttcaatgaataccaaatatttaataagcatagatgtttctgacatattgatggataagccatgaagtgccattttatgggtcagaaaaacatggactagagaaaaattcatgtgcacacatgcacacatatgtagactcatggatgcatttgtgtgtgaagatatttatgttgctgtctcagtcaaaacaagtgggtctatgctcttctctcggagcatctttaaagtgaaccgagagtatgaggcacctatgaagacccatcttgaggattatctcagaaaataatgttctccagaaagatacctaatttggaatattatgcctcctgccacgttcccaatttttataccttgaagaaatgaaacttaacatgtgaaattttgtttctgttaaaagggagagaaaaatattatccaaagcctggcatagcggtatgtttctttatgctcacttgctggggcagcaaccttttcacctggcaggtgtagctttttgaaaggtttgtggctggttttgcttgtgctacagtgatgtgaagtctttccatatactactcttttgacagaagcaactgaagcgtggcgtctcgatccacaaagcggctgcattgttagttgttagcttcttcacctgaagagtggctttggggtcttttgatcctaactcaaagcttactgttgcagtcaagtggcatcagtttgttttgttttcttgtggggaagatattggatactcgtaggcagtaggaattcatctcccatccgggggaaatgattgtaaagtttaaaaacgtgtttctacattggaaagcctggtatcttactaaaagaaatcccttgttgttgtttttgtttgtttgtttgtttgtttgttttttgttttttgtcttatgtgccttgaatttacttttctctatagaatcatgaaatatacagcagcacacacggactagcactcaggagactgttggtggcagcagcaaaaaatctgggtttggattcatgtccttcatctgaacagggctctcctgagtctgcatcttctcatttataaaatgaggcagttcagcatcatgaatgggaagatgaggttggatgcttggtttctgttcttggccctagagtctctggctgcagatctggcagaagaacacacacagcctttgaccttgcttccatctttcatcatgctctggtgtgcccttggtatttaagtgaacaggatgccactggctcaatgtcagtggggcttgagctctgggctgccttccagccaaaggggtggatttatgctgattcatcgacacttactgtccagatgctgtcttttccaatgtctactggagagtttagcaagtctgctaaagtttatgacagtttatttgatgtttaacttgttgctaaagtggaaaatcctaagcggtatatccaaagtgacttgtgtagatcagaaaagtctgactgcttataggtcatatgctagatatctgttacgttttagtatcaataactgaaatttattatgaatacttatttgaagtgctgctcatgtattgctatcatttaactgtcatgtcagccatatacagagtttggtctattatcacctgcaggtgttttagttacttttctattgctatgataaaacaatacaaccaaggcaacttggggggggggggataaaaaagaatgtatttggatttatggctgtagagtctagagtagagtaaaggcataatgtcagaggcaggaagcctaggatttacatcttgaaacagaaagagcaaattgaccctagtgacaaacctttcttcaataggccagacctcctcaattgaggaaaaagcattcaaatatccaagactatgggaagcacttcttacttgtatcatcatactaggtgagagccccaaagggctaacatgtctaaagtcacatgtaacgaccaggttggaattgttcaagctcccctggctgtgcttctgactaatgtgctgacccagtccttgactgatgcttctcccttcctgttttgaacagactttctctaccgtctaaggttggtaccttcaatttggagtcaaaccaagaggttagagacatcgctactaactttaagtcagagaaacaatttgtatgcaaactttataatatatgaaattgggaaatatcccatgtgtagttggatttgcctttgctggattttcagatttattcatctgaaatactgatttgaaagatgccaatttgggcacaggtgggcaagaaagtcactaaaatacatatgcctcctagttaagttagaattatcactagcagatgtctgtgtggtaaaccatctcacttcagatcaacataagtagagcctatccattgtcaatgcatacagttccagaaagggcatgtcttcctcttttagctccttttatgttgacataaaacaatacatgaggctggaaattttataatgaaattcatctctagttgttctggagtctaggatatacagattggaggcctcgcatccagtgagggcctttcttctatggcatctagtggtggaaggccagaagcatcatgtgagtaagagggtaagagaaggagaaacacagttatccctgttacagggaagctgccctcttagtaaagacatcccaggaacaccgttaatcctcactgccccttaaagtactcccaggctctcaacctttttccctgaggtctgaatttccaacatagaaactttggagaacacatttaacccacaaaccagagaaaattagtgtgtccctccctcccatctaaattgagggaacttcatacatttgttggagctgagagcccaaatcatggaatctagttgtggagtaatcactttcagggaagccacctaatcaggaacacctacattggactgtaacatggatggggataatcttttagtaactaaggcccggagagtctaaggcttatctggtatagaacagctaatgttccttaggccaaggtttgctaaaagaactgtgcaaagctgctattggctttaatctttgttcaaagcaaagacacagggattctcttactgctgggccttggattgctgagtaataattgaacttagcagtcctttgttactttttcaattaagaatgttattttatggcctcagaaattgctcaaaattactgtgaataattttgcttttcagccccaccctcagaagatgtctcacaatatctagagacatgacagacatgcatagaggaagtgctggaatcttggggtagaagacagggtactgccagcatcctgtaattgctatggcatactcttagagaaaaacaacagctgacttaatatttgacagttgtgaggttgagagggccagtcttagaaacatgtttggagctgaaagtatgtcctcacgacaagccactcacttgaactcatggagttctgcctggtccctgctgtactttaggtcctgtttttagatacattattcaggacataggctattgacaataaggatccttttaaatctcaggtaggatgttgcaatggaatgaatactatttagaaaagaaaatgttggctttaagacctggagagaaagcttagtggctaaagtactcaatattccagtacaaggacctgagttcagttctctataagtttatataaaatgagaggtggtgggtgggacatttctgtaagtctagtgccagaggtggagatgggaggatcccaggggcttgctgaatagccagccagtctagccagtcagtatacacacacacacacacacatacacacacacacacacacacacacacacacacacacacacacacacatatataattttgtccatcatatctaatatatgtgtatgtgtgtgtggtgtgtatacagagaaagagaaagagtcagaaagccacctgacattgactttctctttctatctccatgggtgtatacaaaggtgtgctcacatgcacgcacgcacgcatacacacacacacacacacacacacacacacacacacagagtagggggggtacatatttctattaatagcagtgtgatttgtgacaagttaataaacctataaacctcactttcttaatccatagattggaatattattatcattacttcctaggtttataggctctagatagaatgttatacataaagcattttgatagccatgcatataaaaaggtactgattgtgaatattcttctgtcctaaaattgtcgtaagtgtgataaaaataactcactaaaagatctgaaaatgtgcaattgaataaatgtgaaataatttatggggtagcattatgtgctggcacatacatttgttcgctgttcatataaataactagcttccccaaagaaaaagtgatcataatacaaaaactaaaacaatattcaactctaacttaacagagctcagtattaattctatcctctccctttttattaaatatattgttagagaattttatccatgtaagtaatgtattttgatcatatttactactttcccatctcttattcccctcccattctttgtgacccttctcctttctccaaatgctacctcactttcatgtctttgtagtctctgtttgggatattttgttttgtgactcactgactttaaccaggatgatttttgtgtgccatcattttgagctattccatgaaatctgggggactttctcttggccactgaagacaattagtcctctctcagcacctatcaagaagttctgattccatagggttggctagggccctttgagcttctcttcattcatgacttaactgttttcaggcttagtattatgcaggtccaaagcagacaaatatagatgttaagtttaggattgcaagtcatgctatgtttagaagtgagcatttcatggccttccttcttttatacccctcgttattccttttccttcttttcttcagtgctcgctgagctttggcgagggtggtacagacagacatccaatgcaggggggagcatttcccagtccctgattaagaagcttctctcatcaaagcctgaagacaacacttgcttatggttataaatccaaacatttagaaggcagtttgaaacaatgtccacttattaaaccaaaatgacaattatatgatgccctctagggcttatgagttctctaaccatagctttttgaccaggtttctagtttagggtgtgaatgccctcctatgaagaaggactcaaagcttcacttgctgtcgtgtgtctattgcaccagtgagcacattttgtctaacaagttcatattatagcatatactgtccatgactaggtaagaccactgatgactttcataactagctacgtacataatacatccaggcactatgaaagctagtcttcatggagaaaacttcccattctgttccagtttgtttctttctatgttcaacagtcattgctttcttgataaagagttggtaagtcacctttctaaggctttgtttaaataactattacttgcttggtatagatccatgtctttttattccttggactttctagtcttctgtggggtttttttgcatgccatgtttataaacatggcttctctatattctttatatatgtccagtacatgtttttccatgtatagattcctgtgttcctgttcaaggctgctgtgccgctgtgaaaaaattcttgaattctttttacaatggcacagagttcagacactgattttttgactctttactgattttagctcttttgttctgagtggtctctccagattccttcagtgctaataatcaggaccaacccattgatacttacactacaaaatattttcctgtttagaggtagtgttttctgcattcaaacagagtttgataaattgaccttacagctgacagatgacaaccttttatataaaacactataagtttttgatagcatgttatatgtttgaaattttaatatgtatgttgacccctagtgcttgatgtgaccactctgggtcttgaaagtgatcaggcctctcactaatactaaatggtcactgactcagccaacatgttccaactaatacatgacatactgacttattggagaatttttcttttaactaccttggcactagattagatagaaagattatggatccattttttaatgacccttgacccctaaaccttgtgcctgtcctttgtttttattgtctggattgtcataatgactttaccttgccttctagagcttgatccatgttgcataaccatgagcactccccttgagtgtctctgccggtgcaagagcacatccattcctttcgtgcttatctcaggaaacactccgtgctcctgcagttgtcgtctcttgagcacatgctgtaattattctcctctgcagtacgaatgaatattgagttctgtgcaattaatgctattacagggcagacacaggcttcttcctggcatcaccagtatgttggggaaattgcagtaattcatgtgacttaggaaccaattcctcctatgacttttcaaatgacattttcaagggaagaagttattagctaagaagaaagaagtcctggagaagagctgattactgttaataatgctggccagggagagctgggcactggcatcctgtctcagtggcctgttgataacatggggattggggccttgaagggcaagagaaatgcgacaaaacagcaggagccagggagaacagttgggttctttggcctggagaaagaagtccaggggaggcaagaagctattttcagctctctaagaagaattaataagactgatcttgaattctccagtaaacagaactaggactaaagggtagaaggctacagaaagttcacccaacccctttggagattgataactagtgtaaatggtgttattttgtacttttctgtgtaaacctaaaactatatacccatttttacatacatattttatattgtgcacaggtttatgtatgtgtttacaaaaataaaaccatgacttatgattttattaaaatggcatcaaattgatgtttcatatgataaacataaagaatttataatagcctataaaaggaaagactgtgatattcatgagtgtgccccaagttctctagaataatatagaataatgggtgtctagactgtctgtttatgcacatctcctatagattctatgaaaagtggattgcgattccattgtctatgtggaatttaatgctaggacagagaactctcagaagaccagaggtctgaccaaatatctctagatgcttgggaaggtgtctgttgggcttgggacgaaattcctttaactttcctgataacatgatggctttgtcacctcaattgcacatttctatgtgggaaataaatttagattttgccttaccattcctcagtgtttctttctcattcttgctctcattttcctaacacagcttacaatattttgatgataaccttttatattttaacatttagagaaaaattatagttatgctgttttcctatatctttgcttagaatgaatatacaatacatgtagtataattaattatatatttattatattaatctgtaataaatattatataaaatatttatgttatataacaatatatttgtgttgctatgatatatacatatgttatattatgtaatataagtaaatattattacaatataataaattttaattaaattaattatattttgattatatatatatatatgtatatatatatgtatatatgtctaagttcccatagtaacaaggatttatgatgtctctaatgattctaataggattaaccagaataaaaatattagttaaaaataacagtgagaaataactaagcacattttacatgctaggcacccctctaagggcttgttatttaaaataaacacagacttaaaaaataggcactgttattattaagtaacagacccaaagtcactcagctagaatgtgttaaaattaggattcaaacccagcttcagttgtgtgtttgttcatgtatatgtatgtatatgtgtgtatacacacacacacacacacacacacacacacacacacacacacacacacacggaagctagatcactactgctaatgctgttccttgggtgttctgcatcttacttttgagacagatttgttacttgcttgaaactctctaagtaggctaggccggccagccaatgaatccctgtctcctatatccagcactggagtacaagagcatgcctctatggctggaatttttagaaagcatctttattttttttttaatgtctttggtgttttgcctgtgctcatgtctgtgtatcatgtgcgtacctgctgcctgtggaggtcagaagagggtcctggatcccctggaactgcagttaaagaagattctgcgctgtcctgttgttctgagctctctggaagaggaatcagtgctcttaacctctgggtcatctctctgctcacccctagcagtttttttaaagtgagttctaggactcacactcaggccttgcaaggcaagcactttctgactaacctgtctccttaacctcctccctcatttcagttgggagtctcaactcttaaagctgtattgggacaattttctggaaatcataggtgcaaaataagattctcttttaaagttggtatagaaaatgggttttccattgtattgtcttgagaagtcaatggtggttaacaggattttttttttaatcaaaaatgttaacctttgagaacatatgtgtcacgcccactgtataacatgaaatcacatgccatctcttggaataaacaaattgctcttacttaaaaatagtccttgtaagatgcacatgagaattgtataaatgaagacttttctcttgctcccaaatgctgtttctatactgacttgagtgaagttcgtttgccaggtttacctgatgctcaagaccctccatacttcccaggattaggagtgggggcaattgagataagcaattccttttacaagacaaacttcaagtaagtctttgaaactttttgctataggagaatgtaaaggggtacatttagtgagaaagagtgagttcagtgcatcctgaggtcatattcttctcccagcaaggtcttcccattcccgcagactgtgtctcttgctggaagttggacaggaggctgagcaatgaggaatggctagtgccaagaaggttcctgagagcaactgtgttttctgagaagacagctatggatactggagggttcaggattgagagacgtggccaaacttcccagggatttgtaggtctaaaagttatgatgcaggttttctattttccacatgcttaaatctgtcatgtcctgacagtcaatgaacatccatggttctcatatagctgaacacatgcttatacctgaaaggtatgttaattacttatgggttcactcataaagaaatttcaagtactgttgcttttctccataggtctgtattctgtcagcagtactgtaccatcctaataattttgctaagttagtagtatacattcttttattaatactgtactgtcttacaagaatgaagtactacagtggtctgactccgggagaattctaaagtagaaagtgcagaacctgttgagtaattctatgttttgtgatgtatgaaaggagatgaccatctgggacagggataactaacttagaagtctctgataaagagagctgggtttgcattgtttttacccagttgtcagaaaagaattgagtcttttcttgtatgctagtggctctgcttgatataacttatctaaatgaatgtgcacatctcaaatgtatcattcagtgaatgtgaacagtagcatacagctgtgtaactgtaatgtagctcctcacagaacattttcagccttccagaaaattcttgtgtgcctctgcattcagcacctctcagccctccacttagaagacacctagaaagagtgaagatccgtgacctacccagcatctgggtgttctcgcttgtcaaccgagttgaatcaatgtcttggtcatcgtttttgtttgtcactcaacacagtggtcttaaatttcattctggttactgccaagttgcattgctcatttttattgccatgtagcactccttatatgattttactacagtgtgcttgtctttcttttggtgagggatgcttcagttgtttgcagtttggggttagtgtgactaaagctgccattatcaatcttagcactggtccaatgtggatgtgttgtcttctttctcaagcaattacataggcatgggcttgttgaatcacagggcatgtgcctgttaaagttaccagaatctcccagctttctgaaatgttagtgtcactgtatagattcatcaggtgttcatgagagaataagagtggttgtaatcacagtcctgatcacttccaccgtctcttatcaagatgttgggagaggtcaccaggatgaggctggcggggatggtgctagaaaggtaatgggtccttctgcagacagcaggacaggcatatttactgcttgaactcctccaccagcaacttctgccaaccttccattaagagttacaccatcaccgctggctgtattacaaaattaattcctggactggttttcagaccacctgcaccttgatctcttgctgaacacccacactagactcttgttgcttcacaaactctcttctgcatttggtaattttcttggttgatccacatatcctcgaagcttcctagttacaacatatctccctaaataggtgtacactgacagctcccggcctctgtttgcctgtaccaaggccctaggagtgacttaatgtctacaaaggactcagctcaggatctaacacaaaacaggagctcagcaaaggctgagtatgagtctttccatcatggtattttctgactttcttcttataaatgagtagaacagacctccatcctgagtccaagtctcttaatgtataatcctagtaaaagactctcctgggaattagtgatttttaaaagggctgggaagaactaactatgtgtaagccttccctgtaagaagggagcatgagaggtgctgtattgacagcagggataacaacttcaacaagcagtaaatttgctggcaacatgctctagaattttctgtccacggttcttttttccttttttttttttcctttcctttcctttcctttcctttcctttnnnnnnnnnnnnnnnnnnnnnnnnnnnnnnnnnnnnnnnnnnnnnnnnnnnnnnnnnnnnnnnnnnnnnnnnnnnnnnnnnnnnnnnnnnnnnnnnnnnnnnnnnnnnnnnnnnnnnnnnnnnnnnnnnnnnnnnnnnnnnnnnnnnnnnnnnnnnnnnnnnnnnnnnnnnnnnnnnnnnnnnnnnnnnnnnnnnnnnnnntttatcattttctttgtttacatctcaactgttatcccccttcctgatatcccctctacaatcctcccactccatccccttcccatttgcctctatgagggtgctcttccacccattcacccaatcccgcctcactgctctagtattccctttaactggggtatcaagcctccacaggaccaagggccttccttcttcttgatgctagataaggccatcctctattacatatgtagctggagtcctggagtcctccagtttggttggtggtttagtccctgggagctgtggctagtcccattagttgataatgctctttctatggggttgcaatccccttcagctccttcagttcttctcctagctctcccactggggtccttgggttcagtctgagggttggctgtgagcatctgcatcagtcttagtcaggtgctggcagagcttctcaggggaagccataccaggctcctgtcagtatttcttagcatcagcaatagtgtcgggcgtttgatgtctgccgactggatgaatccctaggtagagcaatatctggatggcttttccttttgtctggcctccattcttgtgaataacatatttatgctagttacaaatttctgaaatgctttctcagcaattggccaaggaattcttatgggcattcactgtaagacacagtcttggagaactattgcagaccttaacattcctatatgcttgaattgggactctttggatttccttttctattcacaatgttaaatattaaagacaatatgctaaaatggacctctagtgtgaattttctagaacttgaatatgtcattaggctatttttaatacatagacaccactttcaaaataaattgttaccacacagtgagggactaggcatattactttccacttctgatgttcctgagacttcacagatgtccacggtgcctacccattttcaacacagaagttctctatgccggatgctgttcggtcctgttttgtccccctttgtccatgttcttcgccttgcagtttccaggcaagatgcatatgagctcttcattgtttgcatccaccctgccacctactgctgtgggactgtacttggggatattatggctgcaggcgggctctctgttttcatctgatctgacagcacgcccagctagcttccagcttctattctttatatatttattcatgatgcccttatctctaggtgatatagctctccaccaacttataaccatattccactacccaaactcttactttgcagttttgatcagtggaacattctttagagtatggtcgtcatgcacagcctctacctgctcttaccccaagagattctataatgccactctgccaagtgttgccagtatctagagtctgatcccacgtttccatagcattgggacccttaccatcactgctgacagctgccctcttccctgaaacatactctgctttagattctgaagcactagagtagctgcttcttttgatgaaactctttcttaccacttgttcttgaccatgtccctttggatcatggaatggaattccttacagaggcctcccaagtcctggaccatcctgaccaaagcagttaccctaggaccttggcctcactttctgcttgcctttaattgtattgtgttaacactatctggatcttagattttcattctattaatgcatattaagcatatgttggatgataatagtttataacaatcaaactgcacatttgaccttagcattaacagtagctggcatttaatgaatatctgctgtgtactggctcctcttttaagtcctttccatttgctttttctttattaatgagaagtagatctaaaacagtttattgccttcattttacatgtgtggaaactgaggtacaaaacagacaagattaattgactttggttgcaaaactgaaggtaacatagtgaagatcagaccctcccaatctcatgcatgacctgtgaaaaagaaaagtaaagaaaaggaaaggaaaggaaaggaaaggaaaggaaaggaaaaggaaaggaaaggaaaggaaaggaaaggaaaaagacagaagagaagagaaaagaaaagaaaagaagagaagagaagagaagagaagnnnnnnnnnnnnnnnnnnnnnnnnnnnnnnnnnnnnnnnnnnnnnnnnnnnnnnnnnnnnnnnnnnnnnnnnnnnnnnnnnnnnnnnnnnnnnnnnnnnnnnnnnnnnnnnnnnnnnnnnnnnnnnnnnnnnnnnnnnnnnnnnnnnnnnnnnnnnnnnnnnnnnnnnnnnnnnnnnnnnnnnnnnnnnnnnnnnnnnnnnnnnnnnnnnnnnnnnnnnnnnnnnnnnagaagagaagagaagaggagaagagaagagaagagaaggaaaaagaaagcagaaaggtactgaatgaaactgcttctccatgggtctgaagaacatagagagatttggtggtgaaggactgtgagactgaccatagggcctgatcctgtgtatcctcctgagcattgcagatagagattagaattaggctcaagcaacagtggcccatgggagtgctcaacacacttgtatcgagtgtggaaggcagtgtgtgagggcctcacatacatctcaagattaagaatctacattccaaaatctctagtttataagattgagagcttattcattaacaaatcagtaatctgtgttaaactggaaccagttccctcccttttgccgtccctgtcatccttacttctccaatcatcacaatcatcagaagaaagcaggattattgctagagagagcaggggcttcctccacccacttggtatatgagctgtctctcaggtggaccttcgctctttcctccagtccacaagtcactctcccatctcattagtggatcatctgctgacctatagcctgcaaaggttcataaccctgagccaaagctaaaccccagagaccctcacctcaatctgaccagtgcaaactgtgtcccatctctacatctctccaactacctctgcccccatcttctacaagaactacacaagatgtgtagcccagctctgaaatgtttgtgtcttttgaaacaagataattacaaaggctgatgggtagtcctggtgaatggaaatctttattatgcattataataggccccagactctctcttgttccaacagagcaagccattcattcttacctggtgagttcccaaatggtccttttgtactacaaggctataaatcaggacacagagggaggagttgaggacacagagggagttcacacctgttcactctttttcccaaaagttcctcaagtctaccaccccacacttcttcctttggggttttattattcaaatcctgctcagcttttcagactgctgctgtctatcagcaccaggggcagggccctaaaaaatataccctttctgagtcagcaggtgtgggatggagccagaggtcttgcatttcttagcagttctcagagggcatccatgctcctccatcagattatacattatgccattacatagatcagcgtttcttcagtcacagcatgcatcaaaatcttgttaaaatagagatttctaggatggaatgtaacttaaaggtggatcaaatacttgatgtgcataagatcctgtgttcagtccccatcaccagaaagggacaccctctttctggttgccagtccttgcggtaagaaattcagaattactacatattatctgtgcccacttctgtcaacttccccactgcttgtctggaccctctgtgttgagatccaccatcctggatgagttggataaagcctagcttatctctcacagtgtccactcactatttagatatctcctgaattatcctttaaaaactgatgatttcacacaaatttttgtcttgtttatgagactgctagtgtttctctgtggaccgtcttatacacatcctttgactttgcaatgtaatgatacacagcaaggaacaagtatcccacaggcagaatttttgccaggcctggcttgctagttatctttctgcaactaggagctacagctcactggtgcatacctccagtttacgagtccattaaataacccatttcagaggcttctgtggactgcaagggcattatgagtttgtacacatgcaatggtgttcacagggttttaataaatcatctacagaagcagcctaccatatagcaggaggctgctgtcaggtcaaagtccaagatcttgagaagttggcccttgccatataggagaagctgcactgggcttctctgacctctgctttgctctgtcctagtttcctgttcttctttgagaccccatgctgtttcttttctaggctgctggatgcaagggttatttgttgctggtgtgtggtttgtttggggatctggaaccgagtgcttttcctttcagtctgtaaatcctgcaaggagagcccataaagagtcttgacttgcctccagaacccactgccagatgcttgcgtccagctttattaaccaacccaagacgtgcattctgtgggcttgtttggtctcgcactctgtgacaactcggcactgtgtccttagtccacctttttctttgggcatgactacaaagggggacatttgattttgcttctttaggtgggaacagttgctctatttatagagtctgagctaaaatttgacttctctgtttcatgatagattgccttatgtgtgcatgtctgttttctttattgtcttgttatttcacacccaagttcctttaggcttctgtggcacctgagtccttgcggcccctgtcttcctttcctgttttactcctggcactgtggcacatctaccagaaccatgccctattgaaactgcctttctttaaagctcccatctttctaggtacccctcctgtgtttatgtcccccagagggacagagccaatagattacatgcacaattacattggcttacctaatcagaagtggaatagtcaatcagtgattatctgaaggttggagggtcagggtactcagtgactgcagaagacctgagagccctttgggagacacaggtgtgactggaggaactgctatctgctatctacaagtggcaagagcagtaataaatagatagatagatagataaatagatagatagatagatagatagatagatagatagatagatagatagatgctcctgtttaaaggatgtccttacttctgtgtgtaagttttctgcctgtgttctattcaggcccctaagtattgaatggtaccacctatattcagatgaggctaccttaatcagttctttgattggcatttggccaatcattctggaaatgtctttgtagttcctcaggaagttgattttattaattttttaaggctttcagtctgatcttactgacaacagtttctagccatcacagctcatccaaaaggctctctatggtgtaccccgacctgctgtcctcagttgccttcagaccacacatgcaggcctacggaggttttaaactaactcttgcaaacgccaagggaaatcaagtcacatgttacccctaaaggcaattgctgtaatgtctggtttcctctccagtagtttttgtaagaatgtgtgtgtttccttgagtagctgggcggtgggggtggaggggggatactgctgcaggcaaatgttttgacactcaagacctagtaaaaggatgaagggacaaaatgcctgctaaaaataagcatgttggtgcagatttggcatactgaaaataatttataccccttaatgatctctgctttctttgtacaagtttggccttaggcaattaaaaacagaagagtgttttaaccaaactgacaattattttttagtatacttcgtacactgtgtactcatcaaaaagtacaaatgctttgtcaaaactgccaaagtatgctcttcattagcactgcacagtgccttactagggaaaacgaataggctggctttcttcctctggatcttctgtcttgtcactggtgcgtttgagggtttaagatgggtcctggatcacagttagaaagttgagtttcttgtgctctttattccccatttgtattttcacttacaaacaacccctactgacacaggctctcatctggaacaggggctgcagttcagtacttcccttgaatatttccctactataggggttgctctcacccaatagatgcctagcatccagtaaacatttaagcagctgtctgttgatctttccaaatgtgcggtgctgaggaaggagaccaggaagctaaactatgctgtctgaagccctcccttgccttattcgcacctattgatccttttcctaaatactgtctgatcacagaagaccgctttgcagaatcaaggtggcttcctttgcaaggtgccctccccatttctcatctgcctcatgccagcattccccccccccctcaatggcatcttcttcaaaactctaaatggttgaagagggcagatgccagagtttgatatagtaaggtgagatgggtaccaccctgtcttacagaaagggaagaacaacactgctcctgctttaccttttattgtggtgggaaacaattataaatgtaaagttaagtctaccccatgcctatcctatgaggttttcatgtctgagggtcaaatcttggaccccatatctgtgagtccaatattctacctccgagctacatcttagaccttactacattttatttatcttcatttgatttgagagagaactcaccttgaattcactatgtaccaaatacagaaatagtcaaactctctccctccaaaactgcaatcccaacaaaatgaatttcatcctcttcttgcttagtgaagtgtacctattttcgtgttccttcactttctatctacctgtgtgactctctgcttcatatctgcttgtgattggaaaacctagctatggttaagataattaagcaggcctgctttctcaaggcttgagtagttaataactatgattctgacattttgagaatgttacgttgaccttgttcttattctgtcaggagaattaagtacgggagaagtgtgccagaatcaggcaccagcttcaaaaaaatttcatttgtaccatttcttagtgttttcttcttttcagttgataaagatattgtatctttcttaaaattattattaattataatttgaactatttaaacacatactcctttaaccccacattttattgctgcattagtcaaagtagtaacctgcaaaattatgtccccaaaacacttaatctactgtaagacagaagtaagatttactttgtaatgagctatggaataaatccaccggtagtttggggattacaaaaatagttcatttaatcagatttcactcagtggttgcttttggaatcccaaagagaaatagcagtatttctggagaaattttcctccttcctagaggaaaggtatctatctgatacaaggattgtctgagaaacactttgtacacaactctgtgtcatggaattctgtgatgtggagttcttcgatggatatatagcctgtcacatgtgtggagtggacatgacgatgtggaatgctttaatatagctttgctgtggtgttgattcagcagtctgtgacacatgtgactcacatcctttagtgatgtgggactgtgtgatattgattaccaagagctatagatctgtgtgaaaatgcctggcccaagagacacaggagaaattaaaatttgggtgttttaaagtatttatgggcttgaagaggcagggccataaacaaagaccaagttcaaaatacaaaatctttgtaaaataaatagtccagcctcctagggtggtgttagttttgatgttaagcagctaagaagttcctgtagaaagctaaaaacagaaaatgattaagaatgtgccaattaagaacaaataggtttttacctctggagtttgctatttatgtgaaaaacgataaggatgtcaaagcaaacatgttctatcattaaaattagagtttgttgacaggatgaagaaaactgtagcctgtcaccttgaaatgtttactttatactgtttttggaagggagctttagaaatctatctaccagtccgctggggtatctcatggctgtactctcaccccagcactctggagggtgaggcaggaagatctcaggttcaaagccacccttggcatctctagatcagtcagcttcaatcagtcagagtagatgtcttgttcaaatactagctaacaagccaaaaaaaaaaaaaagaatccatggccatcaactatgatgatcttggaaaagacaaatccagagtaggagaaggaagagatagtctaatcatggattcctgctgcctctaaagtgaacttcatgtgtttttcttttgtgtttccttggacttgcttttatagacatgtccattagctagatgatactggatcagaaacagatacatgcatgcagtgaacttgctgtcagattggggatttacccctacccaggatctgaatcgtcaactcttactcccaacgccacagttccaattaaatcaaattaaattctcactgtcgctgtagaagaacctaaacttcttaaataataagaagcacgaggaggatgcagttatacggttaattttaactttattgagaaatctcagggttggattaactttgtgttgttcaaggacagagaaagctggctccctagaaagcagatctctcaggcaaaatgagtgggaggcccctgagggaagatgtgattatccatgtttccttcaactttcttctggaaagaggtgtttataggtgtgcctcagagattctattctgggaatgagggccgaggaagcaggtttctcagtaggatgatcccagagaggcaagattttattagtgactccactctgtctgaaaaaaaaaatgtgctcctggttcccaagaaacatgaagattatcctcctacacatgtatgcagaaagaagtgtccttactctagacaagaaaaaaatcccacatacaatggacctcatatccactctgacgttctttccagcatttataccaaacagctaaatgtacctatgagaagccagtggggattccaggaccttttctaagagggagaggtacttgggcatcctcttggttttttcctgctgcatcccagaaggatgtaagcatggatgatgtttgaattcttatctctacctaaagccagagaagtgctgggcaggaaaagccagaaccagacccatttgtgatgtatcctcaccacacatggattcctacctccaccctcttgtgtgggggagaagtaggcttgaacctcgtcaagccactgttgctttgtttactttggctgttttctttacttagtggtaatcttaaactaacctagaacacacccattataattatcagttggatccaataaatttaattaatagctaatatttattccctcagtttatgctaaaacaaggacagtatatttacttaaaagcagacacctatcacctaaatgtaattgtttgtgtttgaattacaaataaatatgtatgaaatattcaaaaagcttatgcacacacacattaataatccacccatatacaaatgcataccttcacacagactatagaatacgccattgtaataattcagcctaataaaatcagtagtacaggactcaaaaaattaacaaaagaaggaatgattacccaggtggcagcaggagaaaaggatatgtagactgtaacaaaaagcaaacgagcgagctctcatgctcgtcacagtcagcattcaagaacctttgatggggcataaccctttatccagttgtaatggaatacacaagttaccaaagtagtcctattatttattctactgactgcagttttgggtaagctgtgctgttggtgtctggattttcaatgtctttacagcctgggcagtttttgcagtctttgcagttgttttcaaaggagatgagtggagaagcaggctgttgtttccttgtgagtagcattgctagtaaatgttggagagaaagggcatttaatttaatactgctggagcatggctgagcttgacaaggatctgcaatttggggaaggttggcaggttgtttgcataggactaggtgagcagtccatactcttgagaaggagaaatatgggcatccgatggattgcagggagagacttgaatatgatccaactgaaaagaaagggaatcagagcatgaagtgacccaaatgcaaggcagaaatgaaaatgctttgatatgcatggcatgattttctgtgtaagaaaacccaaagggtctgtttttagcaaatcttccagaataaataatgagttcatcattattgtaggattgagatcaattgaaaaaaaaatcagttgtttttctatacacaaagcatgagccactagaacttaaaattcaatttcttatggaaaaattgagtaagatatgtcagtctgatgtgtacagaatactacaaaatactattgaaagaaaccaaagatgatctagcgacatttggaaatcttactcatttactagtggaaggattccatattgtaaagatgttatttcttcccaattgactattcatttaatgcaaaccctataaaagttttagaaaacgttttgtaacatgggttttaatatttatatgctaattcaaagaactgaccctaatcactatgctaccaaaatggaaaactgaagttgaagaagtcacagcacctgattttaatttactataaattgtggtaatgaagaaaacattattttggcaaaatataagtaaacagataggtcaatgggaagaaatgaatgtggtcaggggatttttataaagccacaagaacaacccaatggggtaagtaaagcctatgcaacaaataggctttgaaagattgggtgtccatatgcaaacatgaacaaaactcagcagtgaaacttataccttatacagagtattaactcaaatgactcatagttagctcacataaatgacaggcatgagtgtgaaatgcaaacaataaaatctgtgttacaaatacaaaattagtgccaggggaattgctcagtcaaaacaatacctgcctctcaagcatgaggacttgagttccatgtccaaagcccatttagaaaagctgcgtgtggcagtgcacgctttccggaccagcatttggtctctgtgtcccacaaggctagcctacttggagagccccaggccaagtgagagtccctgtctcagtaaataacatggaatgttctcatagttgatccatgtcctgcacacacacacacacacacacacacacacacacacacacacacacacacaaactgagagagaaagagagagagtgagagcataattttgagtaactttgaattttaagtgtgacatcaatgaaaacaaaaaacataagcagatgatttagaagaataacttcctcaaacataataaccccaaataattgatctacataatactccttagtgtagagaactttctaaatcttcaatgaggcttcttggagttgttttttttttttttcctttcaggcagcacactttaaatggagatgcaaacaacagccttacacttgagaagcctggtaaacattgccacaggcaggggatagagccaaccatcattaagtcagactgatgacaagtaacttagataggatgtagtgggatggtgtggatgtaggtcagtgttttagagttttagagcactgctcagaactgtctggccctgggtatatatagagagaaaggtaaagacagaggtcaaatgtcaaggttatcaaagacaaggaaagcatgtgtagcactaacagtatagggacataggatacctgagtgtaatgtcatatttaatgacatggagccacaggagaaagatcatgggtcaggttaaagacttaggaataaaagatgaacttcagtgaaagtgttaatggcactttattagttacacctaattatcacgctaatataagatattaaccatagaggccattgagtttgatatacagaagttctgtgtacatctgtttataatgccataattttctataaatccaaacagttctaaaatgaattacttttctttttgccttttaatggagcaaggttgaaagtaggatgacgtttgtccagagctggggtggggagcagatagtgaagtgttattacttaatgtaggcagaatttcagttggaaaagataaaaggctcagaaaaagatgacagtgacagctgcactgtgcacttaatatctctgctttgtacacttaaaatgattaaaatggtaatttgtaaagttgaatgtattttatcacaataaaaacttacaaaaatagctctaagatagacaaagctagggaagaggaactatagaaggaccgaaaataacatttgaataaaacagcaagaatgtaggatggttgagaggacgagtgggtgaaagctaccactaaaacctcaggtgtctgttaagcacacagttggactcagggtttaaattttctctattcacttgtaaatattgcagagctactccacaataacaataaaaacatacaaaaattattttagatagttaaatctggtgttcaatatggagagacatagcaaacggtagagggtatatacacaagggcctgctgggagacagacactcagtattgttctgtgtctaccccatacattattgttaatcatttcaacatgattggatgccaatattcttagttcccactacagagctggctcaggatcattgcttcctgtcgctggctcaaattaattaggaagattaaaaatgtctatacatacataaaaaatatagcagcagtctacagggagaccatggcatttaagcaaacctatatatgttagggaatgcttgctataatttttctttttatgacttattagcatatatcaatgtacaataatgtcttgttatggtttttacatactgttatgccttttaattatattcactcctcttagcctttcctgttcctatttctcttcagaaccagcctttcttctctgttcatgttctcttctttaccccatccttcttcctcttcctcctctttctcttttcctcctcccacccctctttctttttcttctaccctttgagtttcattagggctgcttataggaccaagagtgagagtagctctgttaggacacaggtacctttctagtagctgtgcccctgaagaaaatgcctctttctttccactattaactatatatccttagagaggagtccggggtaaaggatgttgacaatcccagttttcctgcaggaaatcatagccactataagtttaaaagttcaatgtccacaaaacgcctagaagacagtgtgccgacagcattccactctgcccccagctcttactctttctgttctgtcttttgtgatgttctcagtgccttggagggagtgatacagatgttccatttatagctggacactcaacaatcactaattctcagcactttgaccagttatgagtctctgaaataaacacttcccactgcagaaagaagcctgcctggtaaaagcttacagctagtctgtgagcataagtataaatacttagaagggacactggctataaattccatgggtctttgtctttctgatcagtgtagtgccttaaccaggggactggggcttcttggggttagagaaggttcttacacagtaaagctcgtgtcacacaggtaagtggttgtatctgtcagaacacttcacacagagtggcctcaatctcatctctgaaacatggagataaaattatgtttttcctgtaagatgttttaagaatttccaatgttctatttttatatacattttattatgagatggcaatatgacatctgtcatattttttaaagttcatattgctctgtaattattttgagtatcttgtctcctataacaaaatacagttcaggttttaaaagcccaatatatacaaagcatttcccatgatctaagtagtctaggataggggtaggtgctgcttataaaaggtagcttttttctacttatgattcaggtagactctaatctactagatccagcatcctctagggtttcgtcatctttcatacaaagaacaaagacgaaagaataagatcagacatgatcctcatctctcttccattcttgtttcatttgtgagcacttctcacttgcccacaagtgctaaggatgctgggaaacacagctcatgagggagaaaggatttccccactgttctccgaagtggtaggggaaagtgtggatcatggtggccagtgagttacctctactttaagatgagtaagcccatcaagaatttcccatgaaaacccatattcttgtgtaagggaaagggcatagccattatgatgaggcctatgcagtgtcaccatttcagggtggcaacccctcagttttcagtgtcctgtaagttgattagtaagaatcccatcggaacaagtttttaatgccttcagcaatgcctatatataattaaaatattatcagttactggagttctaacattaaatagtgtttaatgagacaatgaggctcttcaagctgctttcttattctttaaaaaaatagacttgcagaatgcatacactataaagtcatactctgctgtatctggaattaattttctgtgtatttgtaaagatagtttctctcatagaaatttccagttaaaattcttgtttaagaatagcacctgattatcatcatgattccatgtttttataaatacttttaagcaaggcaattattcagaacaagaaacccatgtatagaccatgctcgtcaccgatccataattgtccacccagagattctcaaactgaaggatgcacaggaatcatttgtagcgttttgtgaaggctgagactgttggttccaggccccttgagttccaagttagggggtttgggtggggtccaaaaacttgagtttttaacaagctcccagatgattcactgcactgaggaaaggactccactctgaaacgcttgctcctgtcaaacaataacaaaaagagagaaagttatgaaatctgtgtgctttctgtgaggttggactatttgctgtggcctagcttttgccataaaaaaaataataacgccgaaagacatacagtgcttaagactcaggttaatttaattctataatcataaaacaggataggaccaattttggtacttaagagatttctgtacttaattttgactgacccacatagagcaaatgtgattcatctgacttgtgactgaaaatccacataacctaggatgtgaaagacgacagattttttccaatgaggcctgcatgagcagcatggtctgtagaaagataggggtggctgagttagagctaagcagccaattatctgcctatatattaaggaaaagaacaagaaaataacaggaattttaagaaaatgcaatataaagtagtttcacaaaagagtagtccgatgtttgtgctagataggattttttttggggtggggggcgtggagggcatgggtgtttgctctccccagatcctcagtgctggggatcgaaccaggatcttatatacgccagacaacggctccatcactgaaatttatctccagagcttatgcctgtctttgtactactttttttttttttttttttgggaaaaaaaaaaaacatgggaagtaattctgaggaaaagttattattatgctctagttatatctgcacaggaagagatacatctttcaatattgaaaatggtgatctgtcctcttgggaacttgaggcccatgttaaggattcatgagttatttcttttgaaaaattatatagccagggacgatgaagccagtctatatttagaccccaaaagagattggaagattcagtagttcaaagctctagaggataaaggacttttatcatggctttataagttgtgaaatgaatacatacaaaatcaaaataggttctgtttgggaagtctgaggctgtgaggaatcaacatagagggtccataaccaaagttgatcactgggattagtcagtggaattctgtttctaggtgatgatctggggccaaaagacatctcccagcaactggtcatattagtgcctcttgcttcccagtgcctcatctatggtaaaagaatgatcttatattagacattttcccttagctatgttttacaaggatgttgtttagaatgatgatgaattccattgagaagaagcagaaaatacaaagatgttctctccagcactgtgcctgtgccaacttttttgggaacagttccatcatccaatgcttctcggtccatcacccagtttagaatttgagaaaagtcacccaaggactctgtttatttgctacccttgactttgtggcaccattcagtgagttctctgttctcagaatgcttctctgcagggacaagggaaagttctggtctgagcatgcgcagaaatcagatgtaaagtgatctgatcttttctgtcagagcagattttcagggggccatgctgtaacaactgctgccaccattagtcaggtttcgtgagcataggtgagcatgtagtcctgaaagctgactgcatctgctcctagcttacacctctcacgttttctatggtctctgcctccatgcaggagacacaagcccatggctgacccaagcatgctgggcttgtgctaggaattttcagggttagcacctgtggaatgcttttcagtttctcctgcctcctctcactttttctatccagaaataccacatatacgaaaagagcacagatagtaacaggaaacaaacccatcttacctcttagtttggattgttttaatgtgggtttgttttagcccagccccagtgctatgttttctttgtttgattcatttatttatttatttttctcaaggtgtagctttaatcgagagtcctggtctctgccacttgcttctggctttttaacagtcttttactctcatccaactttctcttctttaacttatgaatgactccaggatcctcaccagttgattaaaataaagtgtctgttgtcatcattttcaacctattcagataaagagaggaaatgtgaggatttctcagcgttctccttgaggtcaagtcaggggcgtctgtagcaaacaaatgccttctattcgctgcccttgtttgttttctttggactggctgtcctgggcagtaatcgggcaaacattaggccttgtaaaagagttttcacaacttcttacttcctttctcattgtcaggaggacgaatgggagcagctccctggtcccctgtgcagaagttcaaggacagtgtgagaaaactattcactatttctccctggtgccaactcactcactgcctacctcccaaatgtgtctacatctgacacaaagattgaaaatttctacattctttaaaatgcatccattcttatcgaactccagcaggtccagatcgctcccctctcctttccatattctctgctacagccttatttgttgaggatctgtgatcctcatgtctctgtcctcagaacctgggctgcgcccaaccctggcacttttttgaatctacttacatcaccttgagcacttgaataagtgctgaattttagcctcacatgattaccaggtcctttctgtttttcctgcacagttctcttaaaatcaaaatcctactgacattttttgatgttgtaataaaattgtgtcatttcttcattctcttccctccctctaaactctccctgaaacctaccccattctccttcaaatccatggcctcccttttcactagttgtgattgattgcatgtgtgtatataattatataaacacatatatttctcattggccagttagcaaccatatttatttaacacaattcgatgctatgctgtgtgttcatattttatcaaggcaatgaatggatccacagcctcccaggaattccagtgctccatagggagaacatttaaagcttgcccttttcgtggttttgaaatctaaactttttacttttattcaacctgtgctgtcttgcgtccctcatcactaaccagtgtcagactcacctgtcaccctcgccctccttcctaataaataaaatacaaagttaataaaattcccgaaaacacctaggaaaatattatttgtgctttttggaaaaatctatttttgctgggattaaaacccattttttttatatttttgagcattcagacatagacacagtcatatctgccttccatctctccctggcttccccatgaagccccaagccccaacttaatgcctctttgtcttttgatcactcaaggaatctagttagtgaagcttgtgaatcatttttattccattttggaatatatgtgttccattaggttcattgttttatttcaaagaggagtcagagcagatggggaaaaatgaaatccatccttagcaaagaggaagtcacacagtggggatgaacatctttccttttagcactgaatatgacaaagttaagtccgactaggggattaggtaaataactgctttttatagctttgatcttcctagtaggaaatatccctcctttaaaatcaggctccttctcttagagaattgatgtggctatactttcgctaaaaggattgggacataatttgcttctacctgtttatctctcaggaagggtaaaaatagcttataagctatcgatgatatatggtgaattgtccagcactgtgacagaatttgaactgaaggaatgctcattaagagggtatgtaataatgatggctcagacacgcagaagagggcaagggcaaagacctaatagttaacagcattaaatgtgtatgattcgggctggttcctagtttaaccttatttcctaaattagatataaatgataaggggcctgtgctttgaattggtcatccccaaaccacgcaaggagttatgtctaaaaaagtattaaggaaagaatcccaggaagtaatagccgctgaaactgcccaagaagtgttggggtgggatcaggccagattgaacatccaactagagccccggccttaaattatgtccttctgagagctccagaacaaaatttgtaccaggaattttgtcctgtcctgtgacccagttgccaggcatcctctctgcacctgtcagtcaaaagcaagagtttgctccagggtacacagccttccagcacatcctgctgtctcctccccccagtgaagtgtggctagcaggccaaaggtagtcaaagatcacaaatgcccattgtgcgagcaaaacagacagtgggaggtggtgtctagctagcaaaggggccgggcagggagccaggtgatcagcagcagaagtggatgtcctggataaatgaaagacaacctggggggacttgagctttgccagagtacttagaatgaagtgcgggtttgctctgtgcttgccttagtgctggggctaatctgcagctgaatcaaaagcaaagtgtacttttcaattcagagcacttcaggagaacctcagggcccatgtattgattgactctgaatgttcttctcaggaaaattcattaagcctcatcctccccattagattcccaatcccatatggtacaaattagcatttggaagagactcagtttgatccctctgccttgccagaaaactcaaagtaattgtaagaagcaagtcattgcaaaggagaaagaagcactacacacatacacacacacacacacacacataacacacacacacacacatacacacacatacacacacacacatacacacacacatacacatactcacacatacacacacacatacatacacacacacatatgtcaatttaaatagattaactcctcaaatattcaaaatgtcatataagatcaaaagtgccttggaaacctgtcatggctgaaactcaatcagacaaaatacaaacttagtcctgaaaaatgtctactgtctatttttaaccaaatagttgaacgtgaaaattagttcctccaggtagatttcacccagtggctacaaatgtagggcaaggctaaatatcatttatatatacttcagagatcaccagatatgccttgattttgtaactagagagaaagggaagtgtatttggttgccagcccagaagtatcatgcacaggctttgaatcagaacatctggaactaagccagccatacttagaatgtggctatgactctgcctggcctccagggctcagaagaaatggttgctttaatctacaaggatacacttgctggtgatacacaaaagtctaaagcagacattttttcagactattgatgagcagtcctttcattgctagcaaggactctggtgcaattctttcataaatggataaaggtagtctatccaagtgtctgaatgtcctacctatccttaattaggtttctctgtgggtagctgttgtctccatttaagatctagggcagaagttctctaaccttggatcatatttgaatcaccctgaggcttacttaaaaagattgttggattctaccacatagcttctagtacagtatgtctagggaaggacaaagactttgtattttgcacatgttctcaaatagtattggcatcctccgtcaaaggaccatattctcaaagccactatattgagacatgaaggggcttaagtagtataactggcacatggtaggttgtgtgttcagttacagtaacgtaagatcattagaagagaagcagcttaaatggccaacctgaaaactctgctggcagctcagccatagtgaattaggtataggccaatgatagcattttagataaatcaaaaggacgctctggatacattgaagtcatctggacttcacaaggggaagcagcttgttccgtgataagtctacagaatctcctatttcttccgaaggaccttttatggaaattagattctgtgctcacccaaaatattcagggagatcgtttctagcactcaagaaacgatttgcaaaatgatggatgctattatcccttaatctgattagcatgaaatgaggatgttctctcagcacagggagtagcagaagattgcatgagtgtaacttttattgacactgatcttattgtttattacttgagtccttaacaaatgcagcaccatacacctcttccctcccccaaatcaaatgtggcacctccctctatgagctggcctggtaataagaactagtaaactcaagcatgttgttcatagacttcacatattctatttgtcatctttaaggtagatataggtatttcatggtgatggattatgaggttaaataaagccatgttatagtttgagatgttctctgggagtagtgtatctgctctttcctgcatcataacaaattagcacacatttaatggcacacatctctcttacagtttcagtgtgtcagagtcacacctgtttggggctcactgggatgcagggaagtctgcagggtggctgcctcacatttagttctaattttgctacctcggttcaggtagttgtcaacctttacttcctcaacattgcttatctgagtcccgtgtctcttcctagtgattttcctttcttagataggttacaacatagcagtcagttcagagcctctgttaccagtctctcacttctatgtcttctgagaaggctcttttggttaactcatcggattgaaagctttcatacattctgcaaaatcctcttacccttgccatctctctcagcataatcatgagcttgatagtttatcatccctgccccagtctcttgggtcaaaccagtgtggttgttttcatatttgaaaggaagtgcttacataaaagcccagatgccagagggccaccttagcatctccctactacaagtggcaaagatgttggtgtgtgtgataaaattgtctaactggccaatagtgttagttctctcatccatcaaggggaagaattcgataccagtgtcactgttgtaatgttcaatgtggtgacagctgaagatcatctcctacgtttcttggcatatccctggtctctgtttttagtagttctacctactattcctgttggtagtgcaaatgtcattgttcatgtctgccccctttggggtgaagaaactttaattctatcacagtaaacttccataaacgttttgtctcattgattcaagtcctcaatggtttttaatactaacacctaaccccctcctcctccttgtggatggactttttctcggcattgattatatgagggtcttctgatttatcatctgactccttgtagttcatctttttctgttcactccagatatcaaaagtacaatgaagaccaagtcattttagaactcctaaccagagtcacctctttctgtccctgggtgtgtatttttgaacaggacagaactgtgaatcaaaaacattccaaaagaaagtagatctgtgtttactgagccagtacagacttacttcttgtcacccgccccccaactgtagtttaacaatgactcgtatgtacattgccttgggcattgtaaataatccagagaagatttaaagtatcacagagaatgtgtgtggtggtttgaatatggttggcccacatgaagtggcactatcaggaggtgtgaccttcttggagtgggtatggccttaatggagtaactgtgtcactatgcagtcaggctttgaggtttcatatgctcaaattgggccaagtctagcagtttccttctgctgcttgtggatcaagatgtagaactaactctcagttccttcagtaccctgtctgcctacatgctaccatgcttctctctgtgaagataatgcactaaatctctgaactattagtcagccttaattaaatgcttctctttataaaagttgcaaagtcgtgatattgcttcactgcaaaagaaaccctaattaagacagtttgcttaggttacatgcagatactatatgtttatgcagagggtgtaaacatctgtagataatagtgtccataaagttcctggggcatttcttctacaaatactgaggaactatatttttttgttgttgtttgttttgttttttgagacagggtttctctgtgtagctctggctgtcctggaactcactttatagaccaggctggccttgaacttagaaatccgcctgcctctgcttcctgagtgctgggattaaaggcgtgcgccaccacgcctggctgagaaactattttaaggcatcttccaatgacgatctggaaactcttgttcaaaacttgacagaggcttaaagtcagtgattctcaacttgtgggttgcaacccatttggggaagggcaagttgaactatcctttcacaggggtcaactaaggccatcaaaaaagtacattacagctcataacagtagcaaaattatagctgcgaagtagcaacagaaacagttttacaattggggtcaccacagcatgaagaactgtattaaagggtggcagccataggaggttgagaaccactgccttaagtacctttcgaatacaggcccttatacttgccacagtgtcttacaaggctggaagttaaccatgctgtctcctatagcacatggcacttttaaacttacatgtcatgtgtttcttcctttcaacctttgtgtggcttattttcctcatattcctccctgggtgttcgtaccagcaggctgcctttgccttcttcatgaactaaacttgtcataagtttctcagcaggacatctatttctgggctaatgctttttgctcctgtttctccactctgtgaattcactcttcttgtgaatgaacacttgttgaaaacatatctaaactgaagtctatccactggaaaaatgccaaccttgggttcttttgctcaaaaatgtgtcttcagtatttactgagtgtgtgctaaattgcaggcactacacaagaatgtataaaataaacaaagaggcagtaattttccaggctcctaactagtccacagcttccatccctccatttccatgagctttgccttctttgcttattatcttctattttgtgcttgcaacatctcccattcaaagtgaaatagaaagcctataaaatgtgtaccttgtttaggggccctattaggattaaatattgcattagagatgctcactggcttgttgaggtgtcatcttttcttacaggatttagcttttgaaagaccgtaggatccctagtctttgattgatgctctgtctctgaaggagaagaataatggccaaggaaaaaaagagaagaaaacacaaataacgttaatttccacattttctattctattggctatattcctgactatatcattgagacagaatttggaagtgtggctggggtaacattcacacaccagaataaagtgacttaaaaacattgagttctagacatagtctagaataggaaaatgtggtgagtaattcacacactgtatctgctgccttttagtgtctgttggttgtttgcaacaactacatatcacattggatttctatgtagaagtgagagttaatgagattttccagtgttttcctgttatagagcccaggttggacagcattgaccattgtatcagattatcattgctagcataaaccaagagagaatacagcttctgccctggtcacttagcccaaacactgtatttgtggagaagaagtggcatagtgtctttgtcacgatattcacaaaaacaaaacaaaacagaaattccatattaatagacaagtatagtataacctgtaacatagcaataaactcaggttttctttttccactgcaaatattcatcttatttcatggttacttttggcaacgaaggtgaagtaaattttctctagaaatagcatctctcgttatttcaggttttcatgaaatacctttaatcttcatatcttgttttttattctcatatgtttcctgtgtgtgtatatatatataaaatcaactctggagtttgagttagaaatgttctccataagctcaggcaggcattttgacacttgactcactgctaatggtgctgtttaggaggctgttaagcacatcactggggtggactttcagaatttaaaggcctttcccacttctctttccctctttgcttcgtccttgctgttatagatgtgctctggaagcttccttcccctactatcaatacctgccgcatgatgctatatccttgaaatgatggactcatccctctgaatacatacccccaaatatacccattctcccttccgttgcctttggttatggtgctgtccagggagcagcagaaacgtcactgattaaccaacttcctatgtttctactagaacttaatgggaaatgttataagcattagcacttatatgtatgcattacttttgcttgctaaatagagacctcaccccaataataatgatgttgctgccacctgcacccatgtttgcaacatgggttaccaggtgcacacacacacatcttcaatagtcagcttcattttgtgttgataacaagagatagttccaaaagaaaacttatgtttcctccttctagattgatggtatctgtattaccttcaacccaagtgagtttaaataaagaaaacaaacagacatccttgtccagggatagtgcctctcattcccactggtctttctttttacaatgcaggttgcaaaaaaggacaaaaattatacctatggaatgaatgaatcaagagcctaaatggggagacagtgtgggggtttttgacagccgtactgtacacattaagcagtactctcagaaacagaatagagttaaaagaacagtgttaggtctattcccaggtttctcctcaattcagaaccctctttgcaggatcccctagacattctccaattatgaattttaaagacgcttggcaggcaatatattaactgattcttgtttttgttgaacagcttaatgaatatcccacatgtggaggtacacataatcacaccacacacccaaccattaatatcttctctgtgagatgtttatggctataattgctgttctgattatgtattgtatgaacttgaagcatgctattatattggatgactaatggaatttggtaacaatgcacagaacttggtattctgggaggagttgcattttaaattgtattctgtcttgaatttgcagtggatttcatggctcatctctttcacagtaggtttgtggctgatgagttgaaatctttctgctgaatataaacgtcagagaccatccagtctttctttagctcacaggtcttacttttctcatttcacattcaaaacaaaaatctgaaacagtattcccccatacctttgacagctactgattcacttttttccatacttataaagttggaaagaagcacactatgtaagtacattttactgtggtccagtcattgaagatggcatagtaggcctaaaacagatatctgttgctgccttacatacccgagcaagccagatggccttagaacttaaagaaaacagctctacatcactgctttaaagacacgtcagaggtatataaatagaagggctttcagcaatatagcaccattttaatgattgattcaatttctgaacatataaagatatttacttacaggacagatttaatataatggaattttcaaaactagtttatggtgttttccttagttagagcaaatcaaattctagattactcattattagtcacagttttatatccagtaagtattattgacagctccctatagaaaaatgtgttagagagtcttcatacaatttataactgttatagagcctttatttatcatcctgtaagtttttctttattagcatatctcaaagtgctggtcctttgaccatcagcaccagttagaaatttattagatatcaaattctcaggccgaatgtccttaagccttccaagttactctaatgcaggttacattcttagagccactggtatatgcagtgttgtcaccatttaataggcggtccaatttgcattcagcaagttcctcaaagctagaaggcaccaactgtcaaatgagctaagagagggaccacacggtgctttataatggactgggtcattaacgctattaactcaggaaaattcgcccagaagaagtttcagtgacacgagtgacatctctgctgtactgtgccttgggttctgcattttcttcatcacggaggagagaaaaagatgccaagaaaaccccagagtaatggtgttttgtgtgaatggatgtggaggatgctattttaaccatccctttccagctgaacgtgcccatgaacagcacttccacctgggtcttccccatgccacattacccaccgcatggtgcccttgatacttttcctgaacacacaattttacacaccagtgagagaggcttcttagctctgtgctatcagaatgaatccctagggtatctggcattaactatcactccacaacttgaggaatgaaacctctggcagaacagaacaatattcattatctccaatataaaagtaatgatgcctactgagttctttgagaacttactttgggttttgtgtataaacaagcaagcaatgtttcagtccatttgttcgactgagaggaaaagctttggtagagagtgttactctcagacttcgttaagtatacaatggggtatggacagattttaccctacccttgggaaatggtcatttaatagatgtggactgatatatattcatatttgctgtatgagtgttttatgctcatcagtcccacctgtattcatctgtccctacttggtcctctctgagaattgatctctaccctcctctctctataaattacaaagccaggaattctactccatccatgtgaatcaaccttcctcagccaggatctgcaggtgttctgaagtatcttctttaaaagggactgactgggttactcacagtgtgttttgtgattcaaacctcacgaatagcctatgtattgccagcattcagtaggcaatgtcacatgaattagtgaatgacatttgttcttggacagatttctcaaatcaataactctcaaatatgaaagcagttagcctaaggtttgagtcccagtgaggaattcagaacccatggcactgctggtcatctatctccttctttatgccacagtctacccagaacactctgatgataaagcttgactctttatcccacctctcagataaccatactgttcccatagtgtagattaaacttccaaaggctttattgataccccttaccttcctcttcagcaaagtagttgctattgctgtggagatgaagaaacctaggcttcaacttcaccaagtctggttttccattatttttctaggatagatccatgattcagttgcctaagccaaacactgaatgccagggtgatagcacccttctctgggttccttcagtactgtgagtgaagctgacttagtagaagtcacagtgtcctgcaaggaaggtcctttttccagatcttcacgtgtcactccatatggtatgggaaggtttccacaggtcactcacagtgcagatgaagccaacatatccactaagacaggtaaaggacttctgagatagagtaattctgggaagaagcctcctccatccaaccttcactccatgtctcggagaggtggtcaggacaaagtgttctctttgacctggtgtggatttgcatgcagtagagggacactatatccaagcagacccttggtactcaatccttaggaaaggaatcaaactgttttagagaagacattggaattgggaggtacctgttgtaaaaaacctcttgggagtatcaatatcagtattcttgagtatcgtgagtgagttgtctagagagtctgttatgggttatctagagtctgctgtcatatgcattgtattatcgtgccttttctgagataagggggctagatatctgcatcccattgactcttgaccaggtaccatttgttggatgattgtaacccctttaagggagttctgttcattataccactgtgctcactaattggtgcacctacactgcagacctatgatcacagtccatcagtagactttcagggttcccaaccctcaggtgttgacttccatgacttcccttcacatcttcaatacttaatccaaatgggacactgaggttcgctcttcatgtgcccttgttggattgtcaccatgcatacaactttgctactttttgtttctgactaatttttggtcttcttccctcttatttatctctccactcatggaatgtgtctctaaatataggaagatcatgaatatcttaggttcatcttaaacctcttggccgttcttctctggaatacccaccccaccctgcactctccaattgtgatgaacctaccttctacttctccaagttaaatggttcttccgtgtgcacccaggggagagtcctctttcctaacttctcataacagctaactgtaaaattggcattagcatcctcctccttgtcatttattcatccatttcttcatgttcctccccccccattttatggccctccagaaaagcaatacacattttgtatgtcctgcagtaattagatattatggttgtttgaatactaaattaaaaaggacatttggtaatgattaagtgaaagggtagtggcttgagatttgtgtgcaaaaaggctgatagcagaatttggtatgtatggtgtgtgtgtgtgtgtgtgtgtccatctgtaatattggccagatattttaggtgagagaatgagctgatgggaacacatccttcctctggcttctcaaatcttatctccttgatttccctcatatctgattgcattcaactagggactccagggtttctttcaactgtgggaccaagaaggtggatttcttttgatttaggaatggcttaagacccccacagggtcacatatcagatatcctgcatatcagatattacactgcaattagaactgtagtaaaattagagttatgaagtagcaatgaaataactttatggtggggtgggggtgggggtcacacattttgaggaactattttaaagtttcacatcattagggaggttgagaactactgtcttggaggatttagatttaggcatgcaaatcatgcatttaacttttttaaagatgctttagcaaatatattggaatatgtgttaatctgagcagttagcagtgatgatttttccctcctgattcaatgagacataatatgggggcgaggggtaacctaccacagttaagtcctcaggcaaacaccgagatgataagattctttaaagtgatgtcaataacataaaacaaagatgaacaatttgtgtggtttcctaacaagttcccattttgcttttcaggagacggagctgttagatctcagccttgtcaaggatgccaggtgtgggaagcacgccaaagctcccaaggtagggaacagagcctgtgcccgcaccagctgttcttctgattctttatctgtgtcaagatatcaattaattgccccagttaaaagtttctctgttgtagctgttgtaaaacacaacagccagtgtgccctcctcacctccagtttcattaaaaaatggaaataatgagtgaatattcaggtttattgctctgcattttcacttttgtctgaagaaagatgtaaatctatgtaatgccaaagaagttccagatcactcttgtacagttggaagtggcaaaatactataaattgtgagtggaaaattccatactgacctgtagtcactaaaaatattgtgtaaaaatactttcaggcaatatgtatgagatgtgtatgaattttgtgtttagactttggtcatattaagaagatatttgagtacatatacacaaatgtttcaaaattttataatctgaaaaactcgtttatcccaagtattttaaataaggtatacttgacctgtgtttgttaatgtccaaggcatacactattttgcaaagtatcacttaacttagaagaactgattgataaacatttctttacttacttttatcataatccatgttcatcctaataaacagagacagaatgaagctcacacgctgtgcaactgaaacaaggatatctataaagccaaaagtcaactctgcacattagtactttggatgatttagggtatgccaagaggaagccattggtttgggttcgctgcatattttctgaagaaaatattctactgctggatgatgaaaatgcatttttgaacttaccgagatagttgaaaactctttgttattggatttaatatttaaggcattagacatttcattcctggtgagaaagtgtatcagcaaagcaaggagacaggggagttgccatttaggagtttaattttcatttttattgtctgcccacaactgttgttttagcctctagaagtcagaacagtgtctttagcatccagaatgatgtgttgctctggaggtacagagataacgtcagctggaatagtttcccctcacagacatcttgcaagccgtaggttggtgctgacagtctggcaccaagcaaataccaaatgctggggttagctgaatgggttaaaatggctgactagaaaatgtgagaaaaataacatctagaaagaaaaaaaatcaaaaatgtttgcaaggaggcttctaaatgtgtttcatatgaaaccagtttaccttttaccttctcttagagggatttccacatcttggcctttacttttcctatcttggaattaatacattgttgatgatgcagaattgtttccatttcagtgttagcaaagactctttttctctttttcaaacaccatttcagccagttttcgtgtcggtctgttagcttcgaatatcgtatcagtaacttagcagcaaaacttgccttttaacctggggatattgacctcacctgacatcaatcctaagaacagttgcacaccccacctcaccagcccacactggttttaatagaccccactgttccccaactatcaggagtcaaagccaatcccatcgcccagactggccctggcctctcactgtaagcgagttcacggctggcttatcagtaaagacttggtttatggatgcgggttgatgaatgtctattgaatgtggataaacggcagaagtggcctctgcactgcgttcagctgataaactatgattagatctcaaagtgcctcccttgggcaagggctttagaaacccatacgcctcagcttgtctatttccacgaacactctgagagacaaggggtgctttctctgtgggccattctcggtccttgctatttcctcagagtttcactctgtgttctccttgctgaagctggttctggtctatgtacctgtgtgaccttgcagaggctgacttcctcctcataggcttagtgatgcttaatagggacactgtgaggaggcaaggaaatggttcattaacaaaccatttgcacaggagacctcaaatttaacttctcatgaaacacctgggaaacatttttttttcttttaaaaaaatgtccttgcctagttctcacctccccacaaagtctggtttcacacagatataatgcctacagaaggtacattgcttcagcgtgttgaaaatcaaatttgcagcagagtatggacatgactactttaatatgctgatgacactgctgcctgaaaaaaacaatggcggcactgaagacagaaccaatgaccttgtctatgcctggcaagtgctctatccccgagttattctccaaccctccctcccatcacttttttaaaaatattattttaaaatttcaaatctgattttcaggaagttaattttcatctcattttcttaaattggagaagttgacatgtcaggagtgatctgggtaggcgttttgttaaaggagctttgtggatccacaggctgtgtgggagaatatgtcagtgaacgagtcctgaatgtgaccaagatgatctctgctcaacctgcataagtacaaatacaacttatctaaaatgtgtgcaatgttcaagtcttattctacagctcagtttatggcatcaggggccataactatttttctccctagccagatgaacctggcttaatctccatcttttcccacacagtgacatgctggacagctcttggctgacatcaggacaggagggtacagatggagaaggattttctttaaagtcttctagaatgaggccagtagaatgccttgttgtgtggcccaaggtagatggctgtttactgggtagagaccatgaagaatgctgggattaaggtgtgccttaactcaggaggcagaggcaggtggatctcttggaatttgaggcaaacctgttctacagagtgagttccagtgcagccaaagcctcatagtgagaccctttatttttaaaaaaaaatgctgaaataacgtttgcaaaggttaaaacaggaaattcaaagtaaaaagtggaaaaaaatgcagtttaaaaaagttttaaaagcttgatcacggtgagtggtggttttgatgtattcttggattctgtttgcaagagttttattgaatatttctgcattgatattcataagtgagaatggcctgaagttctcttttttagttgggttcttgtatggtttaggtatcagcataattgtggcttcacaaaacaagttaggtagtgttcattctacttctattttatgggatactttgaggaaaaatggtatcaggtcttctttgaaggtctggtagaattctgcacaaaatctatctgaccccgggcttttttttttttttttttttttttttttttttttgggcagaggtttttaatcacatcttctatttccttgtgtgatatgggcctgtttagtaatttacctgtgcttgatttaactttggtatgtggcatctatctaaaaaaccatccatttcatccagattttccagtcttgttgagtatgggcttttatagtaggatctgatgatgattttannnnnnnnnnnnnnnnnnnnnnnnnnnnnnnnnggatgtggagccagttggagggtggatgggggatggggaatggactatggagtgtaaaaaataaattaataataaaattaaatttaaaggataaagttaaaaaaaaagtttaaaaagtagaacaatgttgaaatgtaataatcctagggactggtaggctgaggaggatgccaagggtgagcccagactggactgcacagcaagacaaacctgtggttaaaaaacaaacatacaaataaacataagcaaccaaataagaaacaagcaaacaaacaaaaaatgtaaaaaaaacaaaagaaaacaaaataaaaaacaaacaaataaataaaaccaaactaacaaaacagcaactaataaggggtccattaaaagccacagagccagcatgggaaaagctgccgactcaggaaaaccccaaagaacaggagaacagccccagtgtaagccttcctgtagaagcttctagatcaagagaaaccccccgtggagtagatgtttatcaaaatatgaaggcaccctgcaaatacttatctatctatttgtaatgctttgttttccacagcattttgctacatcaaaattcagcagtgggcagagaatgagctgttttctgtgcctgctgtgatttgaaatgacatttttaggaaacggagaaggcagtgtgatgccccgctaatgaacttaagtgtcgacttccagcatagtgcatagggtgaaaatctgctcttctgggttcagcctttgttcaagtcactggtttggaaatgtctcactggaatgactttggaagattttataatctaaatgtaaaaatcagaagacatcttatagctttatctctaaagtgcattgctcttcctctctctcactctttccctctgccccgctactatttacacagtgcacttcctagccaggcactgcagcacatatatctggtgtatgtagttcatgtccactctgtgggctgattttaaaagggagttgatgctcagacactgacactgtggaattgatctagtagtagttcttgacccagcagattaattttgtggcttgtgtccagcattaattaaaatagacttgactagaattaaaaattcagtctggtacagtacagcttctttcatcaaactttgtgtgtgtgtgagtgtgtgtgtgtgtgtgtgtgtgtgtgtgtgtgtgtacattcagtgcctcttctggaacaaagtctatgtctttgctataaagctgcatgaggaagattataagatgcaaatgcagaaaaagatgacatcatcatgttcatgatccttgggatttagcacattagtaagtgtgccgaacattagatcaagtagggacaaggggctcttagttcttgccagctgtgccaccgatgagcttaaaaatggcgtgccttccttctgctgagcctcaccttcctcatctgtgcagtatggtggatttctggttagaagagttcaggttgtgctagcccttgattccaaattttgtgagagaattaatcatactaaggtgtctcatactttagattctagaactggtgtctagcaaattgatataatctaaaacttctcatcatgaacatgaaatcaggtagaagtaaagaaaaaaaaatcaatacccaagctcacgaaggtcacaggatataaactaaaagaaaataatatctatgttaagggttatacatggcttctcaaaagtaattttaaattaaatttagacttcacaggaaggaaagtcacactgacaaaatcctcccaactttataccatttgctacctccaggctgtctgtattcagttttcaatgacacatatgccaattatctgtgagaagcattgccatgccgtttcttttgaactttactttctgtaaagtgaactgtttcacacactttcctgaccaccagatcctttgataggggttggtttatttcagatcggtaatgctaatttcaatgtggatgctttgtaaatatctaggtcaataattacgttctacattgtatatggtatcagcagaatcccatgaggcttattagagtaaaattaaattttaaaaattgattagcctttacttttataatctctatgtagaaagtgatgcttttattactatttattaattttattttgaagggtttagcaaggactcggtgatttctaggcagcatgctcctaggctctgggcgaagtagcattgaacgaacaagacagctatctctgcttcatgtgtaacgtgtgtttggaaagggtgtactggaaaactgagtcttcaagtaaacgaacagaaaccttgagttctgtgatggccgacttcctatgcggaaggattttttgctggtgagtttcatgtagccagcccaatatcagaaagtggagaaaagagtaaagcataccatggcctctagtcctatgaacccattctgtcatgtcatagtatgaggaaaagagatgacaggtaagtcccagttagaaaaataagccagggaggaagccatagaccatgagccgtggggaggccttttgttttacaaggctgttacagagtaagttatcttgaagaaacaggaatttaatgataggcagaattgtgtgaatgacccacccaccagcagaatatcaaggcagagggcccagaagaaatcaaaggctccaagttgggaatatacatcagttgaactactatggggttcaagcctgagaacatgctagtggtttgagatattttctggaataagtaaggagacagaatgctgagacagacaaaattaaatctttggaaacagtgctggtaggaagtactggtgactgtgttgagaacaaaccttggcacgtgaaggaagaagcaacggagactgactgaatggctactccagatatcctgaatagtgatattggtgacttgtggtcaagatggtagccgctgaggtagtgaaaaacatggtaaaatgtaaatatgcattaaagatgagaacttggcatgtattgatgtattagatatgatgatgaaagaaagaatgtaaaaagagctatcaagtaaatttaccttgaaaaattagcatagttggtttgttatatcctgagataggaaacaaaagaggaaaggaatgcattataaatgaatagagtttggatctagatattggatcaagatatctagatgtagtttggctctagtgtttggttttgaataattaaatggttgtgtttcctgtcaaatgtttaatgttaagaagactaatagtgagttcagagatattggatctagaaatggaattttgggtgtttaaagcttgggtgagatgtcctagtgaatgtataaaaaagaaggactgtaaggctagggaggttcagtagataaaagtccttgttttgcaagcataggacttcagttgaatgctgcagaattgtaaaaagctgcagcatatttggacacatctggaaccccagaattgggaagcagagacaggaggatcctgagagaccgtttgccagctactcttgccaaaatgccaagcttctgtttgactaagggactttatttcagggtaatagggtagggaacaaaagaagcaaccctcaaattctgttccaaagtccacatgttcacttatgggcacatatgcctgcacgcttgtatatattatgtccacatatgaagcacagtgtacaaatacagagaaagagagagagagagaggagagagagagagagagagagagagagagagagagagagagagagagagagaggtgggtgtggaaggaggtaagagagagattggggaagtttcagaactgcatccagatgtccatggcacatagaatttaatgactttatgaggatccagctaaagagtctgcatccagtattttaccaaagagttgaaagcagaaaccccaagcaagcaagcccttattgaacagtgtctaaatgaacggaaatgcacaattgatgcatatacttgtatactgagtattagccttgaagggctgaatttttaatgtgtactatatgagcaaaccctgaagatatttggctaaagtgaagtaaggcatatagagaggacaaataaggtgtgactccattctaaggtcagataggcagagtattcccattcaaagaataaagtggtggatgccagggctgtggggcagggaagtgaaggttgttacttagagcagagctcagtttgagaagatgaaggagccccatgggtgtattaaatgctggcggtaccacagtgtgcattttttaatgcctgagacttttgtgaatcaggtcttgagtaaaaaaatgaaataaaataaaataacaaataaaagcatccatgtctcttgaaatgcatttaagaaagagaaaggagttggggtgggggatggggttcaagtggtatttcctcctaggtgtttattttcctactgaatagtcctatttaggataccactgcacattctttcaaaatctccctatatcttaaacatgtcttgctagtattcataaaggactgtttatttaagggttgtcaaatcccaaatagctcatcataggatttggatgcctacatagaattctcataatgagctgttatttgggtgttctacaacagtggtttcaatgaatcatctccaatgctcagagtttaaatgagaactttattcatcgcccctcttggtgattatcagcaaatatcctgactttgtctagatttatcattgtgtggaactgcagacataaactctgatgtagatatttgtgggctagaaagaaggcgaagagagagagagagagagagagagagagagagagagagagagagagaggaaggaaggaaggaaggaaggaaggaaggaaggaaggaaggaaggaaggaaggaaggaaggacactttatgcaacaaaatcaaagggctcctcactttcactaaccagttaatgagatcaacctctgacccttactctccgcttcaaccatttcttaattcacctcacatgctgcacgagctttttcagagtaggttttgtcattctatttctataaatgtgtttatgattttttactaaatggaagcaaaatagagctaaaatttcttagaatgtgtgtgtgtttgacagctattcacgtgtatctttaaatgtaaattatatggcatggttccttttgatgttcattaaattccatatatgtcagtagtttccttggaaacagaaacctttatataactttggtagcagaaacattaggattctggggttggtgagaatgggtgccgatttgtacttgaaatcctacagccgtttttacctgagccttaccttcagctacatttaatagtggaaaggaaaagaccctgaaagtgaccattaaggcacagcatatcttctctaatggctggaagcttttactttctctaaagcatttttcagatctgccatttttgctgggatgttagaatagaatccccttatttgaggcgatcttagtatgtctcttacctgtagttaaatttgaatttttgagcaattcctgcgttattcagtatatgtgcatgtccatttgtaaaatataaaaaactgaaaacatgtatgcttaaattaatgttctgagtttttattatgacaaatctcttactttagtgccttcctatctaatagttcccaaggtacttagttgtctaggaatgaagggatgccacacctctccacctctcccaggggtggaaaaaggcagggtggcagacaatatgtgtgtcctggttcccagtatcaaaagcattgcttgttggaattagttaaagcccagggatttttaagaggttttaggtcttgatgatagtgcttttgtcttatgagatctcaacctataaatagtgtattcaacttgtagaggtacagggtaaataatctaaaaacatttctcaattttaattatttgaaatgaaaaattatgccatcttgtggttttcattgttaatattttttaaaaaataagtctatccactgacctgtgctctaaagcagggcttcaattgtgggttctaatataaagataggagaaatacttggggaactattaaaatcctgatgcttgtccacacccagatcaattaaattatgatgtgtggtgtgggtctcagacactgtatttcctctgaagctccttagaggcaaacttgtgttcagtcaagtcggagatgcatttctatgagtgaaagttgccagctaaaatggataatttctcttttgaagactgatttcagaattatgatatagaaagacactgggaatttttctacaatctttccgtctagtgttctttaaacctgactgctgttctcaattaagaaaaatatgtgtgccctatggtttcatttcctctgactacattggaagacgtatgggttaagacttcaacacatgaattttgaagaggcataatgcagccaaaagaaatatttcttcgcagtatttttatgaccaagtgtatgactttcttctataaagagtaattctgacataataaagagaagtgatctgttttcattacaatcaatgtgattgtcaaagggcaagaggccatgatagttgagatcatttttaggatccatgttattgcttttctatgtggctttactggagaacattgctttttctgttgccacgaagttttgtatgtcctagagaaactaccaagtgtctttgtgcactgtcaatgcctaagagaacgtagctactgcagcacaaactcttcggtgtgaagcagtatcccccccccccccaaatagcaagctgtataacccagcacatcattttctatataagagacttggtttacttctctggaatgcaagcttaatctaagtgtttaccttacctggttgctatagagacccaagaataaaatgcatggcaagtagtcaacacaacggtgacttcattgcatctgcaagatatactttgtctatcattattaacaaatgttgataaaaatgtgtaggtgaaagcatgttacaattggaaaatgttcttgtacatggtagaattttatgtcctactttggattccttcttattgagaattgattccattttatctctgatcattaagttgaccttcaaaaatctatttgtaatatattgactatttaaaaaaaatgaacttaaagcctggttaattctatagccagccaactacctctagagaactgtttttgaaactctattataagactcacacttcttatttagaaaatggtccggaaaaattcctgaacagaacagcaatggcttgtgctgtaagatcgagaattgacaaatgggacctaatgaaactccaaagaaaatggtccggatttggcaagagtttaatagatttttctcaacaatcaaaataattttaaagcagtttgctcccagtaaggacatattggcattttccccctatattctgaagccactgaagggaaatccaaagcactgttttgaaataaaataaaaggttttgggtcagaaagccccagattcaagccttggtatataagttagttgagagttcccaagaatgtgccttggtttgtttgggatgagaggagcagctgagtggaactgttggttgcgtttaacaatggtgaaaaacaagtttggctttaggggagtactcatggctcctcagctgtttacctgttggtgtctcattggtgtcttctccgcagagctaagtaagacagataggtatgtatgcatatatattccttacacttcctccacttggaagatgagattctgaagtcatttgacataacatctaatgcagaaatactggaatgttaattgacaggtgatttaaggggggagagtgttttgggggagagatttcaaaggaaagtgttttatgaaaataccgagcctatccatccaattcctgactgccattagaactcagagtagatagagcacagtgttagttttcgtgaagtgggcagtgtgattacaatgtttgtgttccctcaaaaattcctgttgttgctgggcatggtggtgcacgcctttaatcccagcactagggaggcagagacaggtggatttttgagtatgagaccagcctggtctacagagtgagttccaggacagccagggctatacagagaaatgctgccttgaaaaacaaaacaaaaaacaaacaaacaaaaattcctgttgtcacttaagcacctctagaatggtattaagaaggaataacttcataagtgtttcccccttctttcatgtgaggacccagcattcaaagtatcctcttaaagcagagggtagccttcatgagacattgaacttctagccagatactccactccaccacagtgagattcaagggtctattactctcaaaactcccaggctaaggcactttgttgtcacagcctagatagttcaagaccctgaattctaaatattgatattcagatgatgtaatggcattcgaagagacctgtgatgctgtcctcctttcatggactcatatgccacagagcaaaataaaggagatgaacaaggacttcagggagtggcctttatatttaccacagtctttcagagttataggcatataaaccaaaattggtttgcagttagaatgtgtgacgcagtagaatctgcaaggcaccttggcagagtcagagaaatggaagagtatgtttcggattattctgaaaattcaaaaattcctttcatttgtcattctgtcctgtttttgaagtggcccacctcaaacacttgaaaagtacttgacccttcaagcacagtgttcagaggtgggactttggatcatgaaggctttgtcttcatcagcggattaatctactgatagcttgatatttagtggactcaacaagttgatatgattgttgtaaatgtatcactggagactgtcctttggggcattatcttgagctgtaactatctctattatcttttcattttaggaggtcatgaggtaagtgatcttggccacttgtattctgcccaccatgagatttgctttcccttggttctaaaggaatgggtccagtgtagcttatactgaaatccctgaagctgcaagtctgattgaatattttctccctttaagttgtttttcttcagtatttgcctcagtgagggtttgtgttcattgcggggctgattccaaatgaacgatgattcaggatttgttatttctgttcaaaattgtgttggccaaggtaactttcctttttacaaatgttaattgaaattgaatttcattatctttagttgaaattaagtgtgttagtcattttttatattgtgtggatcatattgttttcatccttagggagctttatgtggatttaataaggcctttaaaagtgtcatagattaggacacatacaaatggtttgggaaattagacaattgttgttagtttttgcactgtcacactgcctaaagcaggagtcagtgagtgagcttgtttctgtatgaatcattccattgtgatattatttgaaagtgaaaatatgtttataagccattatctataaatgttttacttgcaaacatgactactaaatgaaaatctaaatgaaattaatttaagattcttcattttatacacatgcgcgcgcgcacacacacagataaagaaggaaaacacaactttatgtttacatattttttaaagtaacaatgcttgaaataaactttccacatacacttttggaaaagaatagtgctcacaatatcaaaataaaagtcaatgattgaatatatttttcatgtgagttagtggttgataggcaattatttttaaagaataaattatatcacaacaaactagatttaatatttaggtttcaggtcagctgtgcaaaattttatgatttgaaatgattgtgcttcagtcaaataatttatctgaagtacactgtagagcatttgaaatattgtggaagtgtgacaagagcccttattattttccccttttaaaggggaaatgttactctagtttatttaatatggaaagtcatgaaagattgagtttgttctgtaatgttttcttgatatgtaactgccacattagtactaaattctttcaagtaaattcttagaaatattccaagatctagaaccttgtcaaatgtcttttactccagtctcttcattgatatgcatttacttttacagtgttcctgttgaattcaagattcaaaattaaaagatgaagccatcacagagaacaatataatgaactgaaccatgctgtcttagtttaaaccatgctgtcttagttagggttttaatgctgtgcacaaataaccatgaccaaggcaagtcttataaaagacgacattttaattgaggctggcttacaggtttggatgctcagtccattatcatcaaggtgggaacatggcagcatctagacaggcatgtgtctagaggagttgagagctccacatcttcatctgaaggctgctagcagaatactggtttccaggcatctaggatgagggtcttaaagcccactcccacagtgacacacctactctaacaaaaccacacctactccaacatggccacactttctaatagtgccattcctttggccgaccgtatacaaaacatcatacatgccttgctttgtagatttagcaggtttcttatgcaaaccagagttagacagtcaaaaaagaaagcacagagcctgcagttcatggatgtactcttgggatgttggcagaacctttgtcccagttagtaaggtgagaaattgttggttctaaagcagaaatccagctctgacagatacaggtcaattcaaaatatttctttaatcttaccaaaataattacttaagtagcattaattgatattagctgcatgtggcaaaaatattcatacaccattaatcctagacctacttgggaagagcactaggattactcaccttggcactgagagactcctgtctttatgactaagaagacaaagattaattatttcaggggccacttcagacttattgccttagtctctaaatgtgggaacttgtccaaaggacagttaagtacaagtcatggaaggattgtgtctttaatttcatcaatggctaaagctatagctgctacaaaacaaacaaacaaacaaaacccccaaaaaacctttttcaagaaaaaaatgaaaaggggaatcagttgcttcgggtggtgactgattccagaaacacagaaacactgtgacttctttgcttattaaaaggcaaacggtgctcaagtgtgtgtttctgtcacctgagtcggcacagtgggcaccacagtcacgataagtacttttgcgtacccatcaggttttgcctcagataataatctattgatctcaaattataaaatatttattattcattttcttttgtacagttagaaaatactctttgtcatctttgatgttattagaaattctgaagccagtgtctgaattaatctcttttgatattatttccattgacggtagcacaggccgtgcaatcatttaacttgaaattgattgagttttgcccattttcatcaagatcgagatctctcttcttatttctcctctcacgcatataattcatttgccatgacaaatttatttcctacctaaataggtacttgttagttaatttccataaaaaatgtttccatagcataacccactagagaaaactcagtttctttgtgtatctgtgtatccattaggaagctttttaataggcaagtgtgttgcaagtttattaaaattaaccaatttcctgaggagttatgctattagtattcatctgggtccttttaattatacttactctcatctttagggctttctgtgtacttgactccaatcccatggctgggaatgatgctcatttcactcatgtcctcttccctcttcttcaggtccatttcataatctgatgctctcaccacacatgtctgcaagaataagaggtaatagacacacatacacacacacacacacacacacacacacacacacacacacacgcacacacacatacacacacacacatacacacacacacatacacacacatacacacacacatacacacacacacatacacacacacatacacacacacacatacacacacacatacacacacacacacacacacacacacatacacacacacacacacacacacacacacacacacacacacacacacacacacacagagtttatagagttctagacctctggggtcaggtaatacaaaatctgtcttttcctagtgatctgtgatggcaggttctttcaaaatatataaaatgtgtccttgtcattcttataagattatgtgccacaacagtttctactgttttatttttttaaatgtttttatatgtctagtgatttgcctgcatgtgtgtgtgcgtgggcgtgcgtgtgtgtgtgtttgtgtatacaacatatgtgtatcttggatccactgaggccagaagtgggcattgaattccttgggactggaaatatagatgactggaaactgccatgtgggtagtgggaattgaattggtgtcctctgaaacagcagtcagtgctcttggatagttaggtatctctccagccccctctgctctgttaatatatcctcaaaatatctccaagaaaacaagagaatcatgacatcgttctttttccttttgttaagctatgctgaggagctgctctctggtggtttttgttgttgtttgattttttttaatttatttttttgcttgtttgtttttagatcagcctcctgtggagagtcttctctgttgcttctcctgctcacccttccttacttcacaacttacttcnnnnnnnnnnnnnnnnnnnnnnnnnnnnnnnnnnnnnnnnnnnnnnnnnnnnnnnnnnnnnnnnnnnnnnnnnnnnnnnnnnnnnnnnnnnnnnnnnnnnnnnnnnnnnnnnnnnnnnnnnnnnnnnnnnnnnnnnnnnnnnnnnnnnnnnnnnnnnnnnnnnnnnnnnnnnnnnnnnnnnnnnnnnnnnnnnnnnnnnnnnnnnnnnnnnnnnnnnnnnnntccctccctccctctctctctctccctccctctctctctctctctctttttctctctttcttacttttttttttgacagaaacacactatgtagctctggctgtcttggaattcactttgtaaaccaggctggccccaaactcccagagattcacctgcctctgccttgcagtgctgagatgagagacgtgccccatacctagctgctgcctgtgtcttgtaaggctgaaactgaaacacagtgccttcctttacataggcaggggtccaatttcaggataaattcctggaattgtttgttttactaacatttccttcacagattttcagttttttcctttttttttaaactcctaattttatttttaatgtcaccttttcacaaaatgaccttaatagtacaagtttttctgtgatagtcttaaaaacttttagcctcccaaggtgagggttgggaatacacaccatacacacacacacacacacacacacacacacacacacacacacggatggatttaatcaagaattccaatgtcaacctagctatcttgtcccccaatattagtagtaataaaatgtttgtggtggaaatggatgctcacagtcagctattggatggatcacagggcccccaatggaggagctagagaaagtacccaaagagctaaagggatctgcaaccctataggtggaacaacattatgaactaaccagtacccctgagctcttgactctagctgcatatgtatcaaaagatggcctagtcagccatcactgggaagagaggccccttggtcttgcaaactttatatgccccagtacaggggaacgccaaggccaaaaattgggagtgggtgggtaggggagtagtggcaagggtatggaggacatttgggatagcattggaaatgtaaatgaggaaaatacctaataaaatttttttaaaaagagaatgtttgtggtgatggtggtgtttatctttttctttttttaattctctgtacatttctgtgccctgacatcatgcagtgtaattgtttaaagctctgaagcttatgtgacacatctaaacaaactctaaaactcacttgagttttgggttttaaaagctttttattcagtgatccaaaaaagattggtgggaattagcaaatggtttatttctaatggacatacagaagtaggagacacactaagcagatgaagtgatataccaaacatgtgttgtatttgtgaaattcaggtttatcttggcatgctgtcgttcatctggtcacccattctagagacagccccatgtaccctctgcagtaatggaggaccactgactgctatgcctgagaccaaatgtgctttaccctgcaaagtgggtagggaaacatgtcgtaaagggacccctgttactgaatggtcacagagtcctgaaatgttgtcgtgtgtgtgcaaaggagaggctgcttttccggttatactgagcattgggtgcaggttttcaatggtgggctcttctgttggtattataagaccttacagatccaggaatatgaccataaaatgtgcttgtactgtcatatctcaagtgggaaacaggctacatagaaaataatgcactttcataacacattcaagacaactagaaaggggtgggccatgtggtttgggcttataagatcccagttattgagaagcatgagagttcaaagacactctgggttctatagcaaacacacacacacacacacacacactcacacatacatatgtgaatatatatatgtatatatatatattcattctcaacaatggactagtcaatgctgttggagctacctagtgtactatcatgattctcaaatacaataaggactttaaaaaatatatgaaattttatatacaaccacacatatataaactattataaagacaagaaacataagtctgaattttggagtttggcaacctctacagattacttgcttttcagccagggcctaatcaatgttgaagaccctttggaaactgagcctcaatgttgtgcacgtgaggaggcattgaggtcaggagttaaggtgacactctgaagacaagtttgacaaaggacagcagtcttggactaaaaataaagagaaggaaggacaagactaaacacagttctctagagttctagtcctttctcggtagaacacatgcagttttctggggcactgaagttgttttgaagaagaccgccataggagctgcctccagattgttcaagctccagtcagaccttcctggaagtctacttaggcccttcaggaaggtcaagctatcaagattagcacccagcactcccaccctgcctcagttaattgccttgtgctatggatggttctggagcaagtgctgccctcttcaggcaggctgaggaattctgctccatctcagtttctattacagatgcacagcattttccctctgggggttttgttttgtttttgtttttgtttttgttttttttttcaattttttattagatattttcttcatttgcatttcagatgctatcctgaaagtcccctataccctcacctgccctgctcccctacccacccactcctacttcttggccctggcattctcctgtactggggcatataaagtttgcaagaccaaggggcctctcttcccaatgatgaccgactaggccatcctctgctacatatgcagctagagatgcgaactctgggggtactggttagttcatattgttgttccacctatagggttgcagaccccttcagctccttgggtactttctctagctcctccattggaggctctgtgttccatgcaatagatgatgacttatgagcatccacttctgtatttgctaggcactggcatagcctcacaagagagagctatatcaggttcctgtcagcaaagtctttctggcatatgcagtagtgtctgggttggtggttgtttatgggatgtgtttgatgcattttctcctatgcagcacttggtttcatttgaatttatcctattttctgttgcatatgaaggaagaatagttattttgtactttttttaaaaaaagatttatttattattgtatgtaagtacactgtagctgtcttcagacacaccacaagagggagtcagatcttgttacagatggttgtgagccaccatgtggttgctgggatttgaactctgaaacttcagaagagcagtcaggtgctcttacccactgagcgatctcaccagccctattttgtactttttaacttttccgtagttatgttatagttttgttgttgttgttgttccattttgctttggttttatgttttgcaacagactcacactccagcccaggttgggctgacactattttaaagtactcttccttaccttacgagttttggaataacaaatcttagctttcagtcatttactcttccattttattttattttattttattattattattattattattattattattattttttttttttggtttttcgagacagggtttctctgtttagccctggctgtcctggaactcactttgtagaccaggctggcctcggactcagaaatctgcgtgcctctgcctcccgagtgctaggattaaaggcgtgtgccaccacgcctggctctacacttccattttagattaattattttatttatttacattccaaatgttgcttcccttcctggttcctcctcaatttcgccaccccatcccccttccctttgcttataagagggtgtttcctctcccacccacccactcccacctcaccatgccagcatgttgatacccccctttcctggggcatcaaggtcctatggaattaagtacaccctttcacactgaggccagacaagccagtcctctgctacatatgtagcaggggccacagaccagcccatgtctgaactttggttgatggcttagtctctaggagctcagaggatccatttgatagttgatactgttagttgatactgtagttcttcctatggggttacaatccccttaagctcctccagtcctttccctaactcttccataggggttcctaacttcagtccagtggttgacctgtaagtatctgcatccgtctcagtcagctgctggtagagcctatcagagaacagtcatgctaggctcctgtctgaaagcacaacatggcatcaataatagtgtcagggtctaggacctgctcgtgggatggattctaagtaaatctggtctctgaatggcctttctttcagtcttcattccatttttgtccctgcatttactttagacaggaacaatcctgggccaaaaattttgaagatggacaggtggtcacatgcctcaaatgggggccatgagtttctactggaggtggcatttttaggtttggctaaggtcatccccattatgtcctgggagtttctcactttcatggtgtctgggactttctataggtcccctctgccccacctcaccctgctgcatatttctttttctcttacatttacatcctcaatcaggttttttccctgttgtatgttatgaggtctgaatcttacatattatttttagaatttctatttctttgttccaattctattgacaattttaaaagtgtgtgtgtgtgtgtgtgtgtgtgtgtgtgtgtgtgtgtgtgtgtgtgatgggatagggtgggtcagagtacaaacttgtctaattagttttttcctttcttcttcatttacatgggatcgaactcatgtttcaggtttataaggccagggcctctaccccactgagcgctgtcagctcccagcactgctttgaattctgtattttaaaatataattggatccttttaagtttactattcttttatcccagtgcgagctactgagaagtctgtcttttggacgagtctaaaacttcaccttttccctgtgagttaggagctactgctgtcttatgcccagttttggctgtgcctgggtctgattctctgctatttcattgctctgtctgtctttgaatgtttgctagaaaaacttaaggtatattcatattcctcagtgtgaaagaggattactattaaagaatgccaagaatattagtacctttttactaagttttactttcaatactattttcctcacttaatatctgggcctatacaatacattttctttaagggatatatatatatcccttaaaggttacatattatatgtatatgtgttatatagcatatattatacatattatataatgtaatatttattatatataatgtgtgttttaaagctacaaatgcagttttattcatttacaaaaattaattttactagttttactgttttcaactgctttggaaatgtaaaacaagttcattcctacttcagcaagtaacatagtcttatagatttaaccacaaagaccagaaaataaaaacaaaaagaaaagtttgtcttataaattcaacttctggaaaatctgtgccatcgcggagctattcattgtataatttggagtgcattttgtgtaaaaataacctgtgtgcattattcatgttggcaggccctttaaatagccataaagcatgtgggagcggattgcatctgccctgtgctttttacgtctgtcaattctaggagatgggaatcttgcataatcccagaagttttcttatgttctgaactgctcgtggcgtttcatagatgtatcttggccgcattatgcgggtcaaaatgccccatttcttgattggactctgatctaaggaggataagaactgtcatttttacctaatcactggggaaagttgcagcctgagtgagactccacttatgtgagtgcctgaaggatcagctttctgcctgtcgtttgtgctgccgtctttgtgacagtggtcaccaggtttatcacccttctattatttattatactggagacacaaatactaaaatacatatttaaatatgttagctcccttgagcagaagtgttctttaggcatttaatatttgtcattttggtggcattgaggattagaccaaaccttaaatctttggggagtgttctttgccacatagtatctctagcccttttgctttccagagggtatctagttaaattgcacaggctggccttgaactcactatgtagcccagtagagcttcaaacttgaagtcttgttgcctcagcgccaacattacaggcttcactaacagaatcttctatttattcttttccagatttctgtatgaatttcagaaccattattgttcttaatactcttggaattttattggtatttaaaatttagcacacaatgataaccatttttgtcattagcataatgattatttctgtccagatggacagcatgactttattttccttcatgctgtctttatagcttttaaaatgtcttaaagtattcatcatatacatagattatatcccaaatactatcccacatgtatagtattctaaataaaacttctatccatagtttgaacatcctttaatgaaatgtgtgtgtgtgtgtgtaatatatacacacatatgtcactatgcaccttatttattgaatcttcataatattttagactgtctttctaataggaatgcaatccaagtgtctctgatggtggttcctccttattgctaaatatggcatctgtattttatagctttgtgatttttatttgtttgtttgccttgaatcagagccttaccctttagcccaggattgtcaatgtagcctgttgtattcactatgtagcccaggctgatctataattcactatgtagcccacactgacctcaaatgtatcctcctctctcagtctctcgggttctgatattacaagcatgggcgaccacaaccaggcttggtattttctttgttttggaacttaattttacatactttgacaacttggtaaaattcttatccatgtgtattttcttaagaattaatcaatattgcatgtaattatatgttatgagaagtcaaatttgtgattggatctaattcagttaaaagcatagtgaacatcttccataaaaagatcttgcagttagtgtcatataatattaaagaataaataagaggaagtgctgctgttagtggtccttacacatgaaacaaaagagcaggaggaaatataagaaacaatgtaatatgatgtaagtatagtgaattccagcaatgaaacatagaagtgatttagaagatgttaaaatttgttttataagataataagtttgcccagtgagctgtgcattggattggctaaattagannnnnnnnnnnnnnnnnnnnccaggacagccagggctatacagagaaaccctgtttcgaaaacccaaaacccaaaaaaaaaaaaaaaaaaaaaaaaaaaaaaaaagaagatggtcatggcatcaccatgtggcatttcaatgtagtgattgttgtccagaaaccaacctgtatatgaacataagtgatgtctggtgagacacacaggtgatcgagaatcaaagagaagattaattttattcaacacctagaatggctttgcctgtcaacatccagtaccctcggatgttaacccagccaggaagggggtttagtggaatctattcatgtcttatgtaaaatttgaatgcccggcctactagacaccaagaccgttcttgctttttcattgagaaggatgacttatgcataatttcctttgtgccataaacattgcctatgttagttaaagtagcttttcaaaagtctttttagggctcatgtgtagctgtttacatatctaaaatatttttcttatttaccagtaaaatatgtgacagagattttgttttctttctttgtaggcaggttatattatcaagaatattgacagctaactcgcactgaaagcaatgggtggtattgtgaatttttggaatgaatccctgtggtgtgagtttttttattttagagtttggaccacatatttgcatatctatatcaaaagtcagagatgctcagttttctattatgtgcaatcactaatacatccattctgacattttccccaatgtttccttccatatctagttgctgacatgaaaatatgagattaaaaagcagtaaggtaaaggctgaaagaaatagtttccaaggttattttacttttctctcatttaccttgaaaaacacaaacaaacatgctcctcgagtagctaatacagtgggggagatagcagttttctagtgcagcatagaattaaagggtgcattatatcaaaagggtctgtggtctagtacagtgctgtatggtttgaagtttctatgaaaatattaaaatcctttaaacattccattttcagaaatattatggacagagttatctaaattatatcttcatcctttacaacctagattgagtacagattgtatatttttgaaacatgattcaggcacttaaaatgacatttattagtaattatgactgctttgagttacaaataatataccaaaacctgtttcttgaagatttttgtggttcaattacatatttttggaaagctgtatattttcctcaaattctgatccctggcagctctgtatttattctctgaaatgtggaaatattctcttagtagacaaggaatgttcaaatcatgagttgtcagtgtttagtgctcatgctagagggtagaacttagagttcttcacaagctgcaacagctatcctgagacttggggacgtgaagtcacaaatatttgcagtactgatgagctatgagtacttctacatcaggcccagctcctgtgtgtctactgagctgtgagttgaagaagttgctcctctgattttgggctgggatctcttgggatctgttttggggtcagctagctcaaggcaggtcaagaattgcctctactgctctgtaagtgatccacattcctttataattgacccagcccaatcatgttcttgcggggaaagaagataaaacactaaggtctcttaaggtgcctccatccaaaaaggtactccatcaattatgcagcattctcaatgccaaggcacgtttctagtttgccttagattggaggggcaaaatagattacccggtagtacaaagactcaccaaatcacagtgatgaaatgactggataatatgaaaagtgggagttgaggctatttttgcagttaatctttttcttccagaagatggcttccacaaagttagagccacctagaacctgggcctccagtagccagaaacatttgcatttgtatctttgctattaatagtgtcagttcacaaagccagatgtccaaaactgttatagaatttagaatcatataaattaaactcaccattactatttttcgatattataattttcaactatttatttatttatatatctatttattcatttatttgtgtgtgttcatatactacaaaaatcatgtggaaatcacaaggcaacttgtagaagtctgttctttcttttcaccatgtgggtcacagagatcaacttagaaaataatcactgcctgctgcggctgctcctgctgcagcagattgttgttgttgttgttgttgttgttgttgttgttgttgttgtcgtctatgatctcagtattatttttaactattttacctaattgttggaatgctccataatggtgggccattcatatctccacctcagaaagcaatcccttaaagtgtgcctggtcatgctgagtacttggaactgaaagccattggaaggccacagaaagctaattctctttctgacctcttatcctttctcctgctacgttgtctaagaatcttagaattgttcttcctcaagggaaacactaatccctcactgaaaagcacagtatggagatgcccaggtagatatgataaaggctaaaggtgatagcttcctgcatgggactctgagacctataaggggcattgggttcaaattgaggaaacacatggactataggtagaagacagtgaatcagcactggctcattagttgtgaaaattgtgtcctgtggatataagacacttatagcaaagctcggtgtgctatggagcctttgtgaatgaacaggtttatgaaaacctgaaatggatgctctaagccagtggttgtcaatcttctttatgccactattctttaatacagtttctcatgttgtggtgaccccaaatataacactatttcattgctacttcataactgtgattttgctactgttatgaataatatctgtgtaaatatctgtgttttctgatggtcttaggcaacccctgtgaaagggtctttaacccccaaggaggttatgactcacagattgagaaccacagctctgagccattgaaaattatgaattacaataccttgcatctttggaccaggtttcttacgtttaaaatcagatgcttggttttattatactgcttggttgaaagtgatgatcctgcatgtgaatctggaggtgagtgaacgcggcactttcttggaatggtgattcttagctttgtgtaatgttacacccctaggcttattagcattttttctaagtagctgaaatcacactgttaaaaagtcaactgttaaaagagtctattttcagccgtgccactacccagctgtgacatgtgagacaaattacctcacattcgtcattctgtctgctgatgccacacacatcgctgcctgttcaagacactgaagagttgtggatatctagctatctagcaatatggtatttttgtttttctactgttgatagtcatgtagtttcattactaattttcatgattcgtgttctagtttgattaaagactccaaatataagctatattattttgatttactatcaaaaaatctagttatgagtatttttctacagtgttgggtactgaaaagattctgaatgttttttagagtcaagtagcattttagtgatacatacattgatggagagagatcactggcacacccagttgctataaggtcccagtaaatcagcagaagccataagaatacatgggtatgatggttgacctgtgaagcaaggcatatcaggactcttgcaggactaggaagtagtttcctgtgatagcattcagctgtctacatgtaaagattcttgccacaattatggaccgcacagaattgaatagactgctgggagtttgccatgtttcaggctttgtatggcatatgtcacaatgtagatagacatacatatagagatcacagccccctgtgaatattaaacttaagaacccaattccatatcttgtaggacaggcagatatgaattcgaccatatggatcttcaaggctattaaggaagacattggcaataaggaatatatacatgaatagtcatttaagagagtgatagagctatgagaaagataatgctgaggaataggagagagggtgatggaagatgtttttgacctagtgcattcctatttatgtcaaaggcaaaagatggatctattcacttgacatctacaaataatagaattaataagccaataatttgacataaattcttattacttttctgtgtctgactattttcatttgtttagatagatttcaactttgtggtatgacaagtaggccccagaattataaaaataaacttctgttactttaagccactgagtgggtggcagtctcacaacagccacgagaagaccatgctatatatgattttagtattcttcctcatgcttcctgccaagaacacatgtacaggcatataattgccaagtcaatgaattctgtgttgattagggccaagtatttttgtaaaagaattcccttaatttatacttcagtaagagtaggaaatcgatcagatcaggttttatacatccttacccaaagtttgcaatttatacctttctggtggatgtgctatagtgacatagggcagcctgtttactccttttactagcatgtttgtaattaaaatatatacagtgtatttaactttattgaatttggtgtgtattctgtgaccacttatgtatcaatttatgaacagtctacctttatttagttactgatttttaaggttaactctgcgtgcaggtgtgtacatacatgcatgtgcatgtgtaaaggaatgcaggtgctaaaggtaaccagaagtattttatcttttggagctagagttacaggtggttgtgagccagccaccttggctactgggaacagaacttggaccatctctccagttctacttcaagttattataattttaaaagttgtaatgacacacagtttaccaaacataggaaatcagccaaggaatctattaacttacctgctgatcctggagtcactaatttcagagatgctccaaggttgctctagctgagtatggaaggattgacagagaaggtatttgttaccagtgcctctctgcaaaagatgccatccatacagttcaactctagaactttcatttgttgtggttacatattttgcatctttcagtttttaaaacctttccctgtcttcaatcagatataaaaactcaaaatgtagaacaactgaatggcatcctgtgacctccacaagtgtcgcctctgatgtagcttgtcaccagctgtagctttctaaactgaatgtcattaaactaccgtcaaatagtttgtaatatgattgatatgttggtatctctttgtccagaaagattgttaccctttaatcagtgctgaaaaaagtgagtaacattttcaactaccacaaaggtaagtagctacatgagacagaaaaagaatcatttttcacagaaaagtaggttgggagaacatgagtaggaaacaaaaacaaaatcttttttttttttttcagaagagtcttttttcctcagtcttcattagtaagggataaatgctgatttttttttagttactaaaatcaaatattattacaataatgtctacaagaatacactgagaataaagttacaagcaaattcaatgtattttccccaagccatctgtgaattaatatctagaagtcatcaaatctgcctaaacaaatgaggaatgagttgtgaaaagcatacagttttcacagtgcatggacttaaaatggtgaggggaatggagagaaagtaacagagaaaaaaatatctaaagaaacagcaatcaaggagaagtagtgttatctcagccccttgcccagcatttcaaacaattctagccaaagaactttctacaccactgtaaatgttctttgtctatgtagctcagcagtcactagttgcctattgcacagagcttctgacacctgacacctgtgatcaaggaagtgagtttctactggcaacttcagctttcctacttcacatctggccttgtgcaagggccacccgcatcagctgggagttcattagcactgcagaatcttgactcttacccaaatgtactgactcaaaatgtgcattttgacaacatctcctggcaaagtgatgtgctcctgaaagctggagaaaccctgccctccagcaatgttcatctgctaattaatcacccattcagagacactggggatcctgcttttattgtggaggagtaaactttagcaatgcattcagctttttgatactgaagaatattcgctacaagagtcacatagcatttccacagctggaaatttaaatttaaaaaagatttaaatcttttccagtggagggcatagcggcttgtgttgcttgttgacctgttgcttccttcacaggggatcaaatacacctttttacatggtacacattgctgtctggctttggggaacatctggagttgaattcatgtctgactgtgtttctctgtagtgaatcatgaagggtttggatggatgccaggtttcattcttaaggccaggactttaagagttacccttataaagttttgaaaactaaaagccaaaagctaaagaaacagaaatcaaagaattcctgtgttttctgagaccattgcccccagtatttcagtgaactgtcataaatgctggaactagaaagtgccttgatggactgggggttgtatgagaactacagcatagttcctgcttaacaagcgctcaccttagagttaaacacgtagatacagttcaatttaataagtcataataaaaatgcccctgaactcatgggcagtccaattgtaatgagattctttaattgacttgaaatttaattcttatcctctgatcccaatggggtcacttatactttgcaaggagacaggatgtctgagcagaaactctcgtggtaaaaaatatcagtatgtcaaattctctaagcccatttcctactagtgaatggtaatacctgcagcaaggtgttttagtgtagacaggaaggatccacagacccatccatccctctcagaaaaccaagcctgctagaccacttcaactaagatattgatcaaaggttacctggctggatcatggcacccataaacacttactaactgggagtagatctcctgcttcagcctggcttggggccacacccctggtgaagtcatccccattttctatacaggtcagaagtattgctgaggttggctatgaagaatgtcagaactaggtttgttttttcttctctgcagctcatgtagatttctcttcatcttctgaccctgacctagagtcagcagatccctgccagtcgatgtataatatcactgtcatatgttgtcaccagctcctgtgattttgtaagatatagtaaccttgattccatgacagtctgagtggtactgcttgcccaaccatgtgccagctttattagagcctagcatgaggatcaccatcttcagtttccctcaagtgtcaggaagtagacaatgtctatccaagtttgcatggcttcacaggatgagatctgattgtagtgaacctcagaaatgaataccgagtggttttagtcctcattctggttttatatatgaaatacaagtagaatttaaagaacatggagtttatttggcctacttggattgcttactttcatttgtttggtagaaacagggatatcagatggcaggacatgaactagcactgggaggccgccatctttttgtgcttgataatgtcacatgggatatcatagcaatggttctcaacctcttgacaaatatttacattactgttcataatggtagcaaaattacagttatgaagtagcaacaaaatcattttatagttggcaatcaccacaacatgaggaaggttgacaaagaactctacactatgggtctttcttctcttcttataatgacagcatgacatcctacttttaagacctcatctaatccgaattggctctccaaagccccacttccagctataataatgtgaactaggactgccatacgttcatgccacagcagtaattgcataggaattttttcctggagtataattcccttagctatggactgatggacctgaataaagcttctggtggcctttttctttttttaatataagattattcatttactataaaccacttgcacaaccttgtatgtttttaaagatggtcattaaattttgaaaaaaaaaagtgttataatggtaaaaaaaaactttacattttcattactggacaacaatttttatctgtgacttcttatctaaatatatctggattttaatacaacactgaggactctataaagttattgtttgacgctaatacaattataacttgttctggagagaggcagattccatgcttctccagtgtgtctggggctctgttttattaccttcctacagagaagacacgaggaacaagaaatatttcttatagcttcaagagacccatttaaaaaaactcactgtatataaaatattttgtattttttccacaaaacttcattaatgcaatttcgacttgattattgcagctaatgattatgtaagcatccttgctcaagtggaaaattgaagatgttaaaatgggactttagtcttttagaaaatgaaattaagctgttttggtgtataaaattcagcatgtaacactttgaatacagtgcttggctgctttaatgtgacacgtagtgcttcgctgtgacatctactttagtaatggggtttgtaaagctaaatgagcttatatgttcagaaatgtctggattctcagacctaaaacacagcctgttcaataaaaggcatctcaaaatattaatgattgttatgctttctcatggaagcaatagtactagagtggaaccagctcttccaaagaataatttactctttaattaaatgtatatagatccaatatgtcaaaaatacttataattttgagggacctaacttcattgtctcagtgttgaagtaagagtcccattgctcttgcgttatagatcatggattgctatagcagtggccattttatatgcaattattgtacatgcaattacttactagaaatgtgcctgtcaatactgcactttatatataaggctacagcagcaaatttgattcttggttcttgccagcttgaagatccatctaagacatagagttatacatttttatagtagaataagaccttggttttttttttccctgtcacatatgggtagtaatttttcctactcaaagggttggaatgaaaagagagaatcacccagtcagctgaaggtgaacaactgaaaatgaagctgtgtgctgaaaggtgaccaccttccctggtctatagatactcagaagtatccctgatctgggatactcagaaggacagaatgtgagtttgtaatttctcaatattctgtgaaccaccacaaggcttactcctgatcacatagaaccataaacatgggatagaagagtaacgggaatttattgaatagatgtcacagtattttcttcttattatagctttttcagtgattgagactttgcaaatctttgtgcctgttcatcagaacagtacatatcataacacgtagaatgccataacatgtgggatgtcataacataatgccaggcttgacttcagaaatctaaattacctgggagagggcagtctacattaaaaagaaaagcaatcagctttgctgttcacagtgtctcagtcttcctagaagtgctgagttttaaagtctgtttttttttttttttttttttttttaataccttggtggaatagactagtttgacagtttggaaagaaactttaagtctaggctgtcaggcagataacatatccctaacaaaaagttaagtgggagaagtatagaagagagagaggttagacacaagccccagtgtacctaggtagaccaggaagaaggatgtagagcccctgatcatgagcaaaaaagaaaacatagaccttatcatttctggggctcatagtgaatacacatatatggttggtaccttccaaggctttccatccagacctacttttctcagtcaatacactggtaagagtttataagcttagtcttgttggtactgatattagccaagaaacttctaatacccaagatacaatttgcaaaacacaagaaaatcaagaagaaggaagaccaaagtgtggatacttcattcctccttagaatagggaacaaaatacccatggaaggagttacagagaaaaagtttggagctaaaacgaaaggatggaccatccagagactatcccacctggggattcatcccataatcagccaccaaacccagacactattgcatatgctagcaagattttgctgaaaggaccctgatatagctgtctcttgtgaggctatgccagtgtctggcaaatacaaaagtggatgctcacagtcatctataggttggaacacaggatccccaatggagaagctagaaaaagtacccaaggagttgaaggggtctgcaaccctataggtggaacaacaatatgaactaaccagtacccccagaactcatgtctctagctgcatatgtagcagaagatggcctagttggccatcattgggaagagaggcctcttggtcttgcaaactttatatgccccagtaccagggaatgccagggccaagaaatgggagtgagtgggtaggggagcagggcagggggagggtatagggaacttttgggatagcatttgaaatgtaaataaagaaaatatctaataaataaaaacaaggatggatcacttgtttctggaagacaggagcaaagcaaaacaaagtaagaaatacaaagacaaggaggttttattttctcgtagtactagagagtgagctcagcctctacataagctgaaaagagtgttcatgattgggctataccctactcttgtggtgttctttgatatataaagataataagatcaagcatgcaagtcccttggagctacagaaggttagggtgataaaggacttctgagtacctagcaccctattagtggtgggtgcatgcatcagatattctgcaaagaaaagctttcaggatccaatccataggaaatgtcctctaccatagggtgcacttgaaatgtgacagttcatattcgcactctgctaagacctgtgttaaacaaaccgcttgtttatgccagacacgaagggtttctgaattgagattccatttactgttgaatgcctgagagttgggggcttgtgaaagttaattgataaggctgactgttaagaaatgccttgggcatcagtgaggcagactttggatgtgtctgtaaaggcggttccaaagaggatttatgtggatggcaccaccccaagggtccaaacactggagtggataaaaggaagaggaaagtccgaggagtgccagcaatgccctctttctctgagcttcagcgatgtgagcaagcaacttggtgtctctaccagcccacttctgccaccgtgccttgccatgatggattaagcatttaaactgtgtccacttattgccctttctcctgtatttctgcttggaagagagttcttcgcattaatgagaaatgtacttctacacatgtatttaattcaaagctgaatttttttcctgcaatcttcctgtatcagcttcagttctttcttgagcgacagcagcagcagcagcagcagcatgtcagatgattcttagaacgtgtcaggctcaactgaaaccaaaaaatacgcatctacattttagggagattctcataggatttatattcatgctaaaatttgatggttgtgggcctagtatttattctgatttatcaccttcatgtccatcaggttaggtacctcctgaggaaatcagtatggaaatagcaggtcttatcagcatgtccagcgactttgctgatgtgccatgatttttggattacacaaatacacctactgcattgtttagcgaagttgtgcgtagcgatactctatattacaaatcgcagacagacaggcaaatgagctggtgtcttttctggggcacctcgatagtcagtggtgtttgtaaaaccaggtatatttagtgaaaacagagcatgactgacagtttgagatggatggcatagataaaaagagggcagagaagtccacaattgcaccttgctgtatatgatgtgattgatataccttcacgcatgattgttggttaactctgacaactgaggcatttacggggaatcaaagccatcactcataattcagctgcagaaatacacatcagaccaagtaaaatgtgtacagttgtccaaaaatgggtaaaagggatgacttctcttcagggttagcaatgatctctaacttgatattcactgtccatgaatatatgcattcatcaaactcagtgaattattaaattcagatctgaatatctcactgaatattaatacctctgtgaaaggaaacatttgtcttatgaaactagactgcagctgacactagccacggccttatgggctggaaagttcacatccatggtcacacagaggcttttagcatatgcaacagggctgattattctgatctcatgggtatcctgattagtgatgccagctctcacaggagccaggttgcagtacgacagagggtatcatagcatgaactctagatatgaaccagcaaggttcaatctggctttattctcatcaatctaaggcataacctctacacgctgtcattttcttatctgtggaaggacaccagatgaaacaggtcttttacagcattttttgaaggctggaggaagaacatgacaaactctctatgtatgtttactagacagataaagggactacagtgaatgaacctcttccatcatgatcttaactagttttctcaatgttaagaatcactatttaagatgaattatttcttggttcctgatactgaattactgagttccttttttgcatggtattgacagttaccagtcaacccattcataagcctcaagacataaggagtgatctagtttggtaaccactgcactctggagtcagtagggaggtacctggcgtgcagcagatgaacaacagcatgttgaatggacaagcaaatgagtggcatttaaataaatctaggaggagttgggtgaggggaactataattcgctggtattgtatggaaaaaatctattctcaatacaataaagagaagtaaaggaataaataagacttgttcttaaaggggcccccatgaatgtagtctcaaattttatgatttactctttgaccatttcctaatgtatataacacactctgatttttctcatccccatcctcacttctccctcacactccctcccaccaagcatttttccctagaagtcttttcccactttcatgtcctgtgctcttgatttgtgatgactaagcttaatgggggccattatatggcaaagagtacagaactctccagtagaacctgataggctcacgagtggacacacactttagagaatgattcactcttccttagcattcacctgtagccagtaagtagttcctgagagaccagtgcccccaggattcccttcccatccataactgttgccaggcccagctttgtgcaggcccccgtgtgtataagagctgctgtgagtattttcattgcaaagtctgtgtcatacccagaagacaacattttgcatccctcctccccatcatacagctcctgcattctttctgtttcttcttgggtgatgctctctgaaccttagagggcacaggatagaggtccttggagtgctgagcacccaacagttgcttatcctcagcattttaagaagccaggagttgctgcattcactgcaaagagaagctaatctgactgagactgagaatagcaagaattgcaaggaatagaagcataaacacaacacagtttgatgccatgtgaattaattgaaataacagcagcctggtttccctgcccccattgcccatgatatcaccaactataggctttgaactaagtttataataacagacaagaattctctaatgtgggatgggcattaagccccctccccgccaccgaggccagttgattacaatcattaacaatcacactaaccatgtattgatttccctggcctcaaaactttggcaggacttggtatgatttgttttcttaataaaggccacaattgctggggtgagaagaaatctcaaaagagttttgatttgcatgtccctgtaaataataattagataacttgtgtgcatctcatgtgtactgaccaatagatgaatgtctttttggagactgagtatctactttaatgatatgagagaagtgtttcaagtgtggagaaggagccaataattagaaaatttattggtattccacgtggagctgtcaatgcagaggcctgaaactaaagcaattggatcttattccagcatctaaagactcagacatcaacatttacatcacaaaaatacctgctttaggcactctttagagagggtctgtcatatagctcattgctaaagcacttgcctgacatgggcaaggctgtgttcagttccccacacacactagataaatacatatctgttgatctacaatttttgggttttttttgttttgtttttgtttttgtttttgttttttgagacagggtttctctgtatagccctggctgtcctggaactcactttgtagaccaggctggccgcgaactcagaaatccgcctgcctctgcctcccaagtgctgggattaaagacaggagccactactgcccggcttccatctacatttaaaaagaaaaaaagtgccttagagccaggagtagtggtgctagactgcacagaagcaggaggattgtgagtttgagggcaacctgggctacatagtaagtttgaagccttatgaggagaccctgcctcaaaagattgacaacaaaacttaagtataaaaatttagttaagatataaatttattataaccttccattgtgctagattgactgttttgaccttcaaatctggcaagcaccatgtttctattagtccctgcacctgccatcgtactccataaggcaggaacccgctcatgttcatttgtgcatctctcagagcttcccagagtagttctggagggattcttaatatgcacaataagtgcttaatcaagctaactgcattagactggaaagtgaagagcacacgtggagagcacagaatccaggactcaaagaaaagctagttttaaggtgcttaaatgacaaagagatctggaagctgggttcagtttagtctttaaatactgtgcttgtacattctcctcacaacacagatacacgcacacacacatagacacacagacacacacacactcacacacactactttcacaggtgtatatgcatgcacacattaaagagtacatagtaataatggatgatgaatttgctttaagtatcatacttctataagataaatgactcaggacaagatttacaccaccaccaaatatgccatggtgaagattcactttgaatcacacaacacccatttaaatgtttgtttcctccaggctcagaatgacattcacgtattggaagccaacaaagtatttgtataactatacacagtgtttattgacttgtttaaattagtttccttttgtggattcctctcaggcaacacagttttagtatgaaggagccctttcaacatccactaagtgttttactagcaagaaaattctatgtgataaaaccactatatctgaatttttcctgtttttaaaatggattagccatcttggctgccatctctctttgccaacatcatcctagcaaaagagctcggcaaagtttttcagacattagaatttaaccataaaatattaaatattaaaatatttagcaaaggttcctgttcagttcaaaagtcagttcttctctagggacagattctgataccaagaaccacatataggcctgaaccacatatatgtatgcatgtgcatgcacatacacacacacacacacacacacacacacacacacacacacaaggacttttaccatttcacccaaggggaagaaacttaagcctctcttggcctgttcaagcttccagcatggattccttgagtccattattaaataatttgacaagtatatgagcacaactatgatgctgtgacagttgtctaccaagggctagagagaaggtagcataaagtagcatgaagactatagatggcctggaccaaaggacggttgacacttccacaggctgggtgagatgtcttcatagaacagaaaattaagtaaaacttaaagcgtacaagtgtttaagatagttttcagtttatatttttacataactgtttatgcctgccctcgaaaatggttggaagtgcaactgtagtgaggtacttatccatgctccaaagaaaccatcaaggcatctttgaaggtgtctcttggtctgtagagaacattagactttgccctccccaccacaacttgcagccttttaaaacactaatctggattcaacatgactgtgttgggcctgagattataaaaccctcctcaggccccaggtgatgccatatgccacacaagtagaaaaggtctgaagctctaagttgaagtttatacgtcccagtgcactgattcctcctcctcttcttcttctctcattggttcttttccttttccctaaggcagagcctcctgtagcttaggctggccttatgctctctatatggcttagaatgactttgaaatcttcttgctccctctactctcagattgctgtaattatgtgttctctctctctctctctctctctctctctctctctctctctctccctgcctccctctctctccctccccttctcctcctccctctcacacactcagagtcacgccctcatccttaaagcataattgcatacctttagcctctgcagtgggtgaatagaaattcccaagacaaggagaatcaatactcagctaaggtggtcaaagtgcagaataaagggcaccgcacggtcagcatcagtgcatgtgtcggctaaggctttgttttctccctgcatctgcagggcgctaaagtgtcctgtacacattgccttcattttttctcagggaaaagtttcaaaagctgtgtccaaagagtgcacttctctctgctttacaagctggtcctttggttttttgttttttgttctttcctgatatcctgcagaggcagcagggagacctgcctaagctcacccgtctcctgctttcagctttaccccatgacacgtttctggcatctgtgctggcagattctgattttacgccgtattgagagaaacataggaagcactgcttcatttctgcctggaagagccagggacaggatggattgtcatttctttccctgagacatggaacagtgattgctgagaaaggaggcagtccagggatcgctcttcacagagggctgggcccatgagcaatgtgctactttaagtcccagtagttcttggacgaggctgaaaataaatcagaattgtaaaggaagaaatattccatgctctccagcactgagaaaataggaactctgtcacaattgaattttcccctctgtgcttaactctttccaagcctacttgttctctgcacaccagagatctcaaactctaattgatcagcagaattaaatttaaattcttctttttcaatctgagctccagccttctaaaagtgcagagatggaggtcagagagggtacaggaaatgaaaaaagagagaactgaaatgaacaagattgtgtagtattggtatcctggatagttttacatcaatttgatacagactacagtcattttggaagaagtgagaaactcctcccacagattggcctatggaccattttcttcatggacgtgggaggacccagttctctttggacagtcccatcccgggctgatggtcctgtgcactataggaaagcaggctgagtaagccactaagcagtatccctccagagcctctccttcaattcttcctttgagttccttacctgactttcatggataatggactgtaagatgtaaggtaaaatgaacccgttcctccccaagttgcttttcctcctgatatttcattctagcatagaaactctaagacacttagggattttttgttaaataagcacatttaactgttcctatcttagccacagaacaatatatgaaagggcacgtgttaatcacttaaacatagctatattttcctgtttctgtgtcttacatttctcaaaactcctaatacagacagaatttgctttatgatatgtagacagagattatcagaacattagaagaaaaaaaaaaaacaaacaggataaagacagcagtggataataaaagggaagactattaaaacaaggagccgggtgtggtggcacacacctttaatcgcagcacttgggagacagaggcaggcagatttctgagttcgaggccagcctggtctacagagtaagttccaggacagccagggctatacagagaaaccctgtctcaaaaacccaaaaataaataaatgaaacaaacaaatattttgagggtttaatgagtggtatctcagctgctttgaatcacgatgccagtgatcacatccaaccttgaggaaacagccccatgatgctggtcaattacgatagaagaatcctaaatagaaaggatggaccatctagagactgccatatccagagatccatctcataattagcctccaaacaatgacagcattgcatacactaccaagcatttgccccaaggaccctaatatagctgtctcttgtgagactaggctggagcctagcaaacacataagtggatgctcacagtcagctattggatggatcacagggcccccaatggaggagctagagaaagtatccaaggagctaaagagatctgcaaccctgtaggtgcaacaacattatgaactaaccagtaccccagagctcttgactctagctgcatatgtatcaaaagatggcctagtcggccatcactggaaagagaggcccatcggacatgcaaactttatatgccccagtacaggggaacgccagggccaaaaaaatgggaatgggtgggtagggaagtggggcggagggtgtgggggacttttgggatagcattggaaatgtaattgaggaaaatatgtaataaaaaaaaagaaaaaaaaagaaaattctcaaaatatccatttacaaatttgaaatcacgtgatattctgatgagcaagaagctcacttaaactgtgcttttctgcctgtgtggtatatttaccttgtctgtacttcccacccattaaacatttcatagctatcccactatcaggctcttggtgagtcacagtgatggagtttaatgagtgatcctactttacttatagtttcaatatacaaaagggatctctaaagtctatcctttaagtgagaagatgaaagttgctaaggaaagggtgtaaatcgtagttgaggttgctaagacttacaataacagctaatctatttgtgaaattggaatggaggaagaagggactcaaactggctttaccgtagaagctttgacatgaaagttcaagacacagtgtgggacaagtgcttagtttgggatagatgtcctagggtgtgtctacaagtaagtgccacacactatcacaacacggacagagtctaataccatcagacacagtcagtgggaggctctaaagatgcacaatgggcagctactatatccactcattcaggagattggagaggaagacagaaaagttggatttttttctttcttttttttttttaatattttttattattatgtattttcctcaattacatttagaatgctatcccaaaagtcccccataccctcccccccccatttccctacccacccattcccattttttggccctggcattcctctgtactggggcatataaagtttgtgtgtccaatgggcctctctttccagtgatggccgactcagagctaaacaaagaattctcacctgaggaataccgaatggctgagaagcacctgaaaaaatgctcagcatccttaatcatcagagaaatgcaaattaaaacaaccctgagattccatctcacaccagtcagaatggctaagatcaaaaactcaggtgacagcagatgctggcgaggatgtggagaaagaggaccactcctccattgttggtgggattgcaagcttgtacaaccactctgaaaatcagtctggcggttcctcagaaaattggacatagtactaccggaggatcccgcaataactctcctgggcatatatccagaagatgttccaaccagtaagaaggacacatgctccactatgatttttttctttctaacttctcacataattaaatgagataactcattatgaggaaggaagagaagagactttcctggcagacttcaaataagagcacttctcagtgtccttgatgttagccaaacaatggtattgttgtctatcaggggttttgagctgtgacccacgtatgggttgtgttcacagcacactagaggaacaacacactagaatgaaattcatcacaataaaatatcagagtttatcagctagtgaggttgaatgcagttctgagactgtttcttggttgctatgtacttgtttctgtgagtgtactgagtgacatacagaatgcatttctcaatgagaaatgtgaaaaatagaaaaaaaaaaaccttactaatctacatgaacacatttctgtcaggaacatttacaatggatatctacatagttaaaatgcaaggaagagcattaaaatacacaagaattaagtgttcacaggcactttgctgttgctatgtttgcaaggcttggatttatgtcttgtttttcttatatgctaggcaatctaccaaggagtcatactgaaagccctacccaggcattttagttgtttcagctgccaggtaagacaggcattaagagacacaaagtgtggagcagaaactgaaggaaaggctatccagagagtgtcctatatctggggatcgatcccatatacagttaccaaacccaggcactattatggatgccaacacgtccttgttgacaggagtctgatatagttgtctctggagagactcaccagtgtctgacaaatgcagaagtggatgctcacagccatccattggtctgagcacaaggtcctcaatggaggagctaaagaaagaacccaaggagctgaaggggtttgcaaccccatggaaggaacaacaatatgaaccacccagtaccccaagagctcccagggactaaaccaccaaccaaagagtacacatggagggacccatggctccagactcatatgtagcagagcatggccttgtgggacatcaatgagaggaaaggcccttggtcctgtgaaggctctatgccccagtgtaggggaatgccaggacaaggaagtgagagtgagtgggttggtgagcagggggagagatgatgggatgggggggggttggaggggaaatgaggaaggggggcaacatttgaaatgaaaatatctaattaaaaagaaagacaagcattaagctccaccaggtttatggatgaatcttatagctttccatggtgagtccactgtgagaggttttaaaagaaaaactaccttgagcttgcccagctgtttgttagatgtcagacagcctggatgtgaacatgactcagatgtaaatgtgcctatcagtcagggaccagctgccaggtcagatggagagagttgcaagtgcagtattcatcacatcgtatgatgaagcctgaggtcttgacatgagagggaagctgtacatttggagacactggttgcaggtatgaaccagaacagcacgcaatcccagcagtgccatgcctgggaaaagaattggcccggacacactgagaatcaagtctcccacctgcataggtagagcatctagctggatgatattagcactcagactgcctccaatcgaagcctttcagtgaataaaccagaagaactactgcatatatatgcacatatcaaaaaagaggaaaaatatataaatcatatatataaatcaaagcaaatcctttcgtgctgttttttttgattgacttgacatagtactgactttctagtattacctattttatctaatatttaattaatatagtatattatacatttataaacatattgacgtttcttcagttaatgcaaatatagacactttaaaaatgagctatataagaatatatgcacaaagaatataagcaaattaaaatggtgaagtcctcaagatgaataatcaaatatctcatgttaatgacaacaggatatctttcttattatctgctagacgtatgccttatctattgcggtgttactctgcaaggtggtaccttgaaggaacattgcctttgggggctttagaggtaagatccagaaacagaaactgaggaaagggcagaggaattctttctaagaaattatagcaagtgtgtacttcttcactccagatgtgaattttattttggtagtgaattgtttttaataccatgaactgtttgcatctgttttcaattaattttgccaacaaatgtatttgctaaaaactcagtcagttctgggacagtcacagcagtaagggagggtatcccgggtttagttatgtacaatataagggtcttgaactgtacacttcatcatgtgcacgaggctgggtgtgcagctgattctacggacaatgtaaaatttgtcagatactttgtgaggtcaactagatgtattttgaaatcgtaagtattcccaaaaaggtcttagaaagaacaaaatattaaccaaaatttaattttgagttgtgagctaaaatgactttaagatactcctggataggtgatgtaagagaaatgtacttctcttgcttctccaaagccagaaccaaggtttcagaagcagctttccctctttgcttgtgtgtacctcttcttataagaacagggatcttgttttgttagggtcctgcccctgtgacctcatttaactttaattaccttcaggacaccaggtctccaactaaggtcatattgggggttaagctttagtgttaatttggaggctacaactcagtcaattaaaggttcaaaatgtgaactaaatgttaatatcttatcaaataagtgtatgctgtggcttgcaggctgtttcccccacttccttccactttcttgtgtgtttcttttctgagaaactttccccatgaccaaagtgaaaagaactctgaagtggtgtttgaagttgccaacattaaacctttggattgatccagcacacttgtttgtcagttgagcaaggaggagaggtagcagtcatactcaaaactaacagctcgaggtgtagaaatccagctggcatcaaaaacacttcctgtctgggcttaacgctaacactgaccccaccaatcctgcatgcttccttctggggaggaaggataacaaggtctcattgactttgctatttgtaagttttcccaccacacgtggtagcaattcatcagtcctggcaggaaccaatttcccagagcaaatggactcgctgtcattggcacattcagctgagattaaacaaagttctacccagactcagcaaggatctcattatatctttaggagagttaaaacagaaacagattccttaccacttctgttccctacctagcttatattttgagagaacctccagacctaaggatcaggaacagaattccacactcctgggatctagctttctaatgattgaaaaacaaaatctgactttctttctaataatggcaaagcaaagaaaactctagggttaggttcccaagagattgttaatgatgcgctagagagtttaaatttgtggagagtgtgataattgtgatatgcagtgtagagagtgattttttccccatgctttctgaagatgttctataaagagaagaattataaattacaaagtaaagcatgtgccacggagtgaaattgctagaatcttgttctctatgtgacctttagaaagatctagtgtcttgtccctctctgtttaaatataaatgaatgctaagtaactgctccccagtgatgcggcaagcattatattagaacagaagctacacaggaacatgaaatgggagcaggcccagaacaagggttcagcatggatgttttcaccatcattactatcagcattatgatcagctggttttatacagctcgtaatgttcttagccttctggtgtgagctactgtgaatagcccacaagaatggcgtagatgatttctgtttataaggagattctccaccatgattagttttgtcagtgtgacacatctaaagtagtcgctggtagcatagggggacaaaattcttctattaaaacccaaaaatgactcagtttgtcgtatttttgattgtgtctttgttactaggaaattatgtggtgattttcaatcacagtgactattaatatctgtggtgtttatttattgtctggtccttagcgtttaattttctgttattaagctaaaaatcataagtaggtatgattatacccaagttgtttttaatgaggcaggaagttcattaatgatttcttaatgtgtgtccttattctaacaggctgcaggttcttcctggatgttaaagtgttttgggtggttcaatgtctatcctattatttttctgtttattttttcctcattcatgtaaaactttactgcatatctgcctgtgttctgcacaccaggcactaaaggttcacaataacttagatttagtctctatcttagtgatgctctgtattcaaagatataacttaacaataagagcaggaagcgtaccaggtgcataaggctgtgtggtcaggaggcagggagattttcctgtcttgtttattgctttattcatctgtgctaggaacaaattaggtgcacaagtaatatttactcaatgacttgctgaactgggcagttcacatttatgaaaatattcaaacagatatttaacaagaaaaatcatatatgttaatgactctgctaagcatttcagcatgagatattaaattcggttataaagttatagtaatgttgtatgtgaacatggagatttgaagagattgtataactttccagtggtcacctaaaatttatgaaccagacaatggtctgcctagcctcaatacctacctatgtcctttttccattaccccatctgtgatggtactgtctggccccaatgctgcaggaaacaggggatagtgttttactttgttagataatgaaacaaatttttaaaagcaaatcatgattagtgggaagccaggtaacccccaacactctcataattccatgttgggtcatgtggctgcttgtgaacatagataattaccttaagcaatattatgttctaataaaagtttgtatcacattgtgacatgccgtacatccttagctcttgggtttataggacaaaatatgtctgcagcagaatgtctgctgaaacactttgagctacaaagccaggtagctgcaaatgaaataagatgacatatctgcccagcagctggagtttagaaccctttattgtcctgcttaattttaaaatatatatattttaaaatatacttattttcttttttatctattacatctacatcactgcctcccctcccggtcttccccctctgcaaacttcctcccccatctctcatccccttgtcacccgagagggtgccccctctggtattcccccaccctcaaatgtaaagcctctactgggttacaagcatcctcacccactgaagccagaaaaggcagcacttaatacttatgtagagccactgttaggaattcctgtgctgcccccatgttatggccctacatccattcaataagctttgctttctgaacacagaaagaatcaggggcttgcttctagctagcagaatttgacacggcttaaaaaaaatgcacatgtaaaattcaggccagttaatttagagttaatcaaaagatagatcattctatgtggttccaactcaataaggtaaaggctttttaagagactaactaggtccttctggggtgacaggctctcttggcatacattatacagtcagtgacattgtcatagaagacatggtgaacaaacaaggcagcatccaataatataggaagctgttgggaatagcagagtgccttcagtatctgcagctactatctacaaagctaaggcatacagccttggggcttaagaaattgaattctgccaacacccaggctgaattttgaaaaagattgttcttaaggtgaagtcagaagatgttaacacaacctagctgacaccttaatcgtagccttatgacatcctaacagaagtctaagtgaagctatgtctggacatctggcccacgaaaagagcaaggtcatgtgaattgttgtaagctgttaagtctgtgacagtttattgcacaatcatgaaaatctactatgtgtacctaagtgacacctgagttgtaatcctcaggggttatctagccttactgacaaggctccatttttaggaggtaaacattgagattttaaagataatcccacctcccactcatatctagcaaagatattttattaccagaggggtggggtggggacttgaagcggtcattcattcaggccgtgagaagctctaggatggaaggtgggctacagtgagatgtcgtgatcccttaatgacacactcgtcacacaaggaaaacagtatggttcttgtggaagtctcaccttttgagtttatgtcaatatacattgcttttaagctgtaattattttgcttcattaactgtagaattttcatttgtgctcaggaaaacacacaaattaacatttcatattaattcatttacagtctacatagcacagagattcctcatttaaaatttattataacaacaacaaaaaaacaaaaacaaaaaaaacaaactttctcctctcatcccctcgttttctctttcctcttttttttctaatttacaatttcttgtatttcaatatgcttttaacctccatataatatctcccacctatttttcagactcttatttttccaactctagaggaaagaaaattcacagcttccatgtgtttttatggaaactcctagttctgaggttcttgttgttgttgttcttttgatttgtttggagcagctcaaatcatgtgacaatttttggcttatcactgtggccatggccattgatgatctagcaggctaggctggtcagcagccttccctgtaaccaagagcaaagttggcctccaaaggttgtgattgacattctgttatcaaacatggagatgcagggaaaaatttctaggactgagaaatttttctaaatgaatgtagaagtcagggaacaaacggaatttcctaaggttagtgagatttggcaaaaaagaaaagaaaaaaaaagaaaaagaacaaaagagagagagaaggcatttggaagctgctatttactaagacattatcttttagtatacacagcttataaccagattgtgcaagagattagaaactgttcaaacaggcataagtcatgaagaatgactttctggaattcattttatcatggtgctaatgcttcaggactgcttttattcaactacacaagcagaaataaaaaataatctgttatggtactgaaaatggagctaagttatatctctcaaataggcactcatcctggtatagtggagagacgtcttatgttttcaccatgtaccttgagctctgctttaccagtctgttatatatatggtaaatctctggctatcaaatgtgaacatatgctagctattgtagtgttcccaagaatagcaaaaatattgatattacatttccatcttattattgttctcacaaattctgagagagtgatcaagaaaactactttaggaaaacttggacccggtgggctatatacacatcaatgacgcttaagagactgataaagaaaaataaattaccactaaataatactagatacatcttcattcagagcataacactgcgaggcaatcattctcttagttaaaaatgcatgacaatgtagtagatattttatgtggttatgctttatgcttgaataaaggtaatatttcatatctttgttttatttttatagtctatcttatgtatttatctataaatagataatttaatgttatgtgctccctttagttaagtaaaccacaaagtgacattttcagataataaatgataatgtgtagccatttataacataagtatttattttatatgcgaataaatctgaggtagagtaaggatgtaaacattgagagaatcacaaaacaataaaatatgcaaaatactttttataactgtacagcatgaaaagacatttttagaaacgacagaaaactcagacaccataacagaaaaacattggcagtttgtctaaacactggaagtgtctaactggcaaaagaaatggtaaagaaaggggggaaatgttacagattgggagagaatatttatttatttatttatttatttatttatttatttatttatttattccctttgcatcccagttggaacctcttccctcctctcctcccagttccaccctcccatgccaattctctctttctgctccttctcggggaaagggaagcccacccctgggtaccaacccactctggcacaacaaatcaagactaagggcatcctctcctcctgaggccggacaagatagtccagctaggggaagaggatccaacagagttcgagtaagaggcagcctccccctccaattgttggagaacccaagtgaagaccaagctacatatgtgtagagggcctagatccagtccatgcatgcactttggttggtggttcagtctatgtgagcccacaggggcccaggtttgttggctctgtagtccttgtgttgtccttggcctctccaactcccctaatcctttccccactctcccacaagacttcaggagctctgcctgatgtttatctgtagttctctgcatctgtttctatctgctgctaggtgaagcctctcagaggacagttatgctaggctcctgtctgcaagcatagtagagtattattaatagtgtcagcagctggctttctccatggggtggatctcaagttgagccaaacattggttggccgttcctctaatctccatcccatctttatacctgaatatgttgtaggcagggcaaattttgggttgaagtttttgtgggtggattagtgtttcctttccttcctctggaagtcatgcctggctacaggaagtggctacatcagtctccatatgcccctttgctagggttctcatctagggttaccccctgtcctaggtcttcagcttgtcccagagatgcctccccccaacagcttccctttctctctcccagccatctcacggctagccccagtttccctccccacaccctctacctctcagttactgccctccatccactttctatgcctttattctcccttctgggtgagatttaagcatcctcccttgggtcctccttgttgcctagcttctttgggtctttggattgtagcatggctattctgtattgtatagctaatgtctacttataagtgagtacataccttgcatgactttctaggtctgcactggacagatggttcgaaggctaagaccactggctgctctttaaagaggtcctgtgttcaattcccaaactccccatctgtgtgtaactctagttccaggagatcagacacccatacttagacatacaggcaggcaaaaacaacacaaccacaagatatgttatatagaaagtatgtgtcatacaaaggtgtttcatacacagcaataagcaaaccaggttctcagacctgactggaaggaagtcacttgcctcagtgactcaggggttagtttaggaatcaaatggctacaagtctccagtaaggtgctctggctgggctagacaaggtgcctctgggtctagtttcaacagctcatttctctgctttctgactgagttgagctcaagattctcagctgcaaacaagtatatccccttagtacctggtccctggcaaaggagagagaagcttccttgctgccacctttccgtggcattaaagaacacgcctggcttactcttggcatactgaaactattttctcttttttctttgatctactccagaaagggaattgggaggaggggagagtcggggatacatcatcaccagggcaatacatctcagaatgtcccccctctctggctattttaagcacctcattagattcttctccactgtaagctttctttaatctgcatttgtctccccagtgccttatgtggagtgtgcactcagaaaactctcgacaagtccgagcaaacgatttaacacttgatggaatgcaaatcactactctgctgcacctttcccatctgcagagttcaggatctttggctaagctatttatagaaaaataaaataaaataaaatgccaagccttgagccctggatggtggtgtcaatccacagtcgggttttctgagactacggactatattttattgactgtttgaaacagcgccttaacaagaaacctctacttttggatgcttcaaaggatgacaagttgaatttttttcctaagacctataaaaaaacaagtagaataaactgtagctatttcatagggaaaagtgaggtgcagatgtattcagatatttaatcaacgaggctggagtgtatgttgaccatttttaaagaactttatggtgtgtgtattcaaactacagtctaaattggaatttttttaatggttgtgtgatatttagatatttgagcagatgttatttggcaatttagatgacatgggataggtttataagctctttacatttcaagtaagcatctgttatatttttagagactatcttttatttgatttaacctagccttcttatttttgactagctagcaccccctccctgccacgccttaggcacacagagaaatgaacttctctatggaacagaattctagatttctaaaagctgcctttaactgcatatgcctccttttgacaccattcttgcctctgctttacctcatatttgatttaccagtgtcagcattcacttcttatctaaagatgtagatgtgggtttacttacaaagtttacagaactggatcatacaaaaccctgctactttaaacaacgttcaactgaaagaatgatgaagctgttgatatcatttctttaaagaattttatgtgcaggagggctttttctaagagggcagttgcagtgtaaggtactagcatcaatgtcaatgtaaacataaagtaggataacccagaagatgtggatgcggatgacttgaaggccagcaatgagtcagtgagggaaaatatatcccaaggctatataagaatatcttaatgatggtattctgacaacaacaaatgatttaaatacgtgttaatcacatagcaaattaaatatgcctggtgggagactgccgtacagtctcatgttctgattctgttatttgaaaactggactttgttcgtgttttccacatccatggaaactacatcacacttctagctggatccctggtgggaggagaaaaattcggattagatgcattatggtggtttaaagtggtacctggactcttcacatgaactgttggttacttttgatatctggagagtttacatattatagcaagaaaatgtgtaaaaactccagccttatcatttcatagtgaggaacttgaagaataaatccagtagactttgctgctatctgacagttacgtaatcttttccaaaatgtgccaattgcaaaaaggcatcattcacctataaacaagtaaccttgctttttgatcatttgccaattattcttatttcatgcaagtagattaaatgtaagccattctttgtaactggtgaccttctagttaaagcagtactgctatttaaacagacaaatcatgtgactcttgtgcctgcttttcaaactctttaccttacattgggttgctatgtccaacttcaatatgatagttttgcttcaccttattatattttattttgtcatgtttggttgttttctcttagaagactatgcttttctaatgagagacaaagggggagtggagccagaaggggtgggaggtggggaagatctggaagaaatacagtaaccgaaacctataatcagatatattttatgaaaaaatgtctattttcaataaatagaaaaatttcaaaactttttttttaaaaagttattgttgccattagttttgaatgccaacccaattgaagtgggaacttcataggggataaataaagggtaccctgtgtatttcagacatggttgaatgtgagatgcaatatcccatagactgagacatggagggaataaactggcctaagggaagggtcatttggggcaggcactatctcttcgttttcctctgcttgaagtgagctgctataccctgccatgtcctacttactaatgggcatactaaatcctcagtaaaagtctgaccaataaataaacaaataagtgaacaaacaaataaatggaaaaagaaaaggaagaaatatccaagagcctgatagcaaagaccattggttacagacttcttcagttacaatggaatatccaacacataggatgctaggattcaagagagaattgcatagtgtacattatccagccaagatatttaatgactgttaatttactacttacaaacaaatatgatcacaatgtaagaaacttgataattcaactcatgtcaacaacagataagaaattattcttattctgaagacttataaataacatttattcaaatacagatagatttgcataaatcgtaggaccaaatgaaacactatttgcttccaaatgagccaagcacatatgacacatgagcagggattgatccctgatcagaacatgacttacttataatgttactcagtcttccaggaaatcctttcctatgctgagcatggtggtccttctcacattgtctatgggatagaatattgataatcatttctgtgctattactgtgacaagaaatcagattttaaaagccagtttaaagcatttgcgctcgtgatttcagaggattttgttcatggttagctgtttctgttactgttttgcctctggtgaggcagaatattgtggcaggaaatgtgtggtagaataaagctgctgatctggtggggggaagcaaaggaggaggccagggctatagccctaatataatcttcaatggcattctttgtaacccaacttccttctactaggccctacctattaacaattccatcacctctcaaaggtgccccaggttggcatccaaatctagagttcgcaatttcactgaacaatcaacagatggttttctgtttggcttgatgaagtctccgatgactttctgacttggcttgtccaattgtgaagctctttatatgtgaacattttcattcagctcattgtatttgtatcaactgaggaagattaagcagaaacaatggcatgtattaccacagaagtgttacataattaatataaagaagcattgtagagaaatatgtacagaaaacaaggactcttattttaggcactatgctgtgttctagttttaattttagaagaaataaacagaagggacactgtcatagctgaattgacactattactaggatgcattccatttgtttatgtatagatatgaataaaaatatgatttaatgattctgtaatatatttatttatattttggatattttctagaaaaaagctatctatatttatatctatatctctatatctaatctatatattaagcacttgaagttttatatccttattagcagttacagaaactcaataagttttagttcaattgaatgaatatctacaccaaaagttcagtgaaatttcaaatcaaaactaccctctcttaagtataaatcgggtggaccttccttaccataattaaccaacattttcaatatcatttaaatcgatcataaatatgaatattagaatatattagaaataaattttgaatttctcaggtcataaagccagtggaaggcaacaagtcttagctctttaaatagatttcttttttcttgagaaagcccaggagattaagctgaccttgccataccaccatcaacaagaaaatcaaacaaacaaaaatcagtgtataagtatctaatgagatttaattcacattgcaccagagtctaggccctaaccttacagcatattgttatcaaaggtaaaattattgtctgctgtagtagcggtcaagccctccatccagattgaaggaagccagcaatttttataaggcaaagggaagaataaaatgttcaatatctatttaaagataactttgagcaatttggggagtaaattggcaggctggtctatggaccaccaagccaaaagcaaaggtgtcatttgtgctgaatttttctgctgccctttcacccattatccatctgttccctctctagttagttctgaccatgttcctactccttgtcctatgaaaagatgtctctgataggatgccttcctcatgttccatgaccagctgaggtggttttgcttttgttcagtgggagtgatgaccaggttactggagtgcaaagccagaggcataaggtgattttttcctttgcccctctgcttcagtagcacatgtctgacaatgcctgtctttgtatttccaacatcaaccctcagcaatgatcattctatgtctccagctttcattgcttatagtaactgcaccctctcacactaccttctccctctcctgatgttctcagtcctgggatagcagcagttcctaatagtggctgattctagagtacacacacctttgctgttggtgattgcaacctgcccataccccagagttctcttttccttaaagtcttttccacatagtttgaatgacttcagatttggatttgattggtttgcctagattctgggattttcagaggtgtggatatttaaattcctagtgggggacacttagaaaaatgaattgtgaaaatgaccagccacctggaggagagtggtcaagcatattagctattttctgtgtagtcacccccaatgaatcaatgtttgtgctgggtcatttcacaggtgatattcctataccccttcttatgaaaaattgtatgtattattaaattctctaaactctttatgaaaacctgctttagattttcttttataatttaactatacagtcaattcattgcttaatctcatcaggggctgatgagatcttggtattttctagttttaggtatgtggaattggaattgtgtagtggcaagctggtctgaagcctgggtggaaggatgcatgaacaaatggatgcagatagctgaatgagacatcaagtttttgggaatagtgataacactctgggtatcatttaaaaacttagagaccaacattcctgtaccagtgagaccctctctggggttatgcttctacctggagcaatgccagtagtgggaatatgggcaggagaaccgtgtggcaaaattaagagctcagagtttgaacattattagaaacttgggtttttatcttcctgtccattcctgacttgttgtgagacatgggcaagcagtgtaggttttggtccttttccctgaaatagagattcatggattcatggatgattcattgagagaataacctacagtgatgtgaggtacattccgaattattcacaacaatagacagaacactgattactatcattaggtcatggcttgtgaagaaaccacaatagaagcgtgagcaacagcctagggactggggacagttcagctgcaggaaagaatgtgcaatgagctcaaaagctcacttctttggaactgcgaagggatttccaaaggaagtcagaaccaatccctcaatggaggtgagagaggaaatattttgttaagttctaacactgtcaaacaaggaagcaagctgatgtgcaatgatcctttgaactactcaacaaaagaagctagacacatacactccggagtatggatttagcaggaatgttttcaatgaaggctaaaggagggagggggaagacagagaaagagagtgacaagatgaccttttacttcccttgggctctgtgatttcagactctgatgtatatgttggaaggaacatcaggaaaatgtcaccaaccctagttgtattggtattgtcctctttgaaatcagttcttggcagcaatcctaagacaggctgtcccaagttgatattgataacaccacatatattttcctgttgggatggctttggatgccaaagatgtattccttccatggcatacaatgccttctctgttgccagcttgcagacttattcaagaaatggcatcggtagtaaatcccattgaaaagctattctttccctttatttttaaacagcatgaaagttattgcaaggaaaagaaaactcacagtttctgttttcctgttgaccctgccagggatttttaacccaatcaagcaggctctagaaatcttaagagcatgcttgccttgtgcctttcactgtttctactgctaggacttgataattacagcttttcaaagatacacagcagacgccatattttcctgtgagcgagagcgtttgtgtggcgaagtggctgatccacttctaactaaatctgtggatgtgttatgtttcaaaggcagcagcagaagcctgcgttggcagaataattgctgtgctagagtgccatcgaagacaaattgtaggcccaaggttgtgaaaatccagtcttacaaaaacttgtttcaacatcagagctcctactgggacagaaataacaatgcctgccatttctgagcacatttggagagaatgtcaatgtactatctcagagataatttcatttttgaaaaatgtgagttctttctgttaaaatgtctcagtgaaggatcatttttgttgttggtttttcaaaaagtgttttcctcccttctctggattttggctgtttgtatgagcagtgacagcagagaacaaatctatgagtcccacagaaaagcagtttcagttgtttaaggttggataaacagctctgcgataagaaaggaaattacctccactgaaagccctggccagggctgttgaacagacagaatttggaagttccttctacttctgagcttctgggattctgtgaccaccggtgccagtggttcagtgacacttcatgaggcatctagaatgcaaaaagtgatagaacactcctcaaaagaatttcacactaatggaagttgaacattagtttgattatcataacttggtttgactgtcataactgctagcaaagatgtatacgaatatgtacttttgacccaccacctcagagtgaaatcatattcttttgttaaggattttgtttttaggggtaaatctcctacaaatgccatgctcatactttgtaaattttatttgacaaattctaccataatatcatttgtgatacatggccaactcaataaacaagggcaaaaacaaacaaacaaaaatatgaactccatcctttttagaagttcaactttatcttagacagttatcaaaaagtattaaggcttgtagggttagatccattcaaagcagcatgatgtgatccatggggctacatcatttatttgccacattgttaatagaggaacattgtgtgcatctatatgtaatgtcatttgaaggtatgtaccaaatgtcaaagtgattttaatagctgtgtttacaaaggctatagaggccatacaatgaacacttgtcttcacaataataggagactgcacatattctatcacctgttacatatgacacctgtgccttctatctccatattgcagaatgacttactaaagctccattttctttgtgattaaaaaccaaaggaaatcactcaaaggaaaacaactgacaatttgcctttgggcagaacttttgagtggctgagtttggttttgactccgcccatggactcttttcagactgccttttttaccaataggaatgaaattactttatattagaaatgccttcccatgcttttctctgtactcccttctttccttgcttcctgctacctggcttctttttttctctcatttaccaaaaagtaaacaaaacaaaacaaaacaaaacaaaacaaaagaaaaaacaaaaacaaaaacaaacaactgaaccctcatgaatgcttaagaggaaacatttagatttgacattctctaaaaactttcctgaaactcaggcctagatttctgatgtcttttaaaaattaataagtaaataaaaccaatgattataaaataatctaacaaatgcaaagcaaatttcattttgaatatcgtgtcaggtaggccctttgcttgcaacatttgactttgactttatatgcttctccattgcacagctatcttcttttatttttaagtctctgatcaagtgcactctacgaaatgaacttttttttttcaagaaagagaatttattctttttgcctctctttctatttaaatatttacattagtctataggggtttgttttggtttgttttggtttgatttcgttttttgtttgttgttgttgtgttttgttttccaaaacgaaaagctcaaaaggcaggtaagggaatctgttctgagaacatggtgaccttttgaaaatacatgatagaatgacttagactcacactggtccactggaaaggcactgaagtgtgagggaaaagactgcttcattcttcagttagacaactctttcttggccttacccaaacatcaagggctttctttgaatgtgaaagtttacttcccaaacattcattaagttctttcagactgttaggcatgtgttgacatactgaagacataaaccagatacctcataggtggtgtctttcagaaggattctcacagagaggtgagctgaaacaaataatgttgtgtttactagaatagagttggcttctacagtggctggttcagctaataaaactcagtgaaccctggaaaaggaacatttgtttctgtctaaaaggagccaaagagggaaggatatttaagttgggctttaaaagactaataagatttttaccagatgaataccctggggaaacatatcctgataggaacgtgatgagttagataactgtaggacttagcaaaggggagaaagggatgactgaaggtggaaagtatgttgacgtaatgatgcccgtaaatagcaatcccttgtctgacagattggtaagttgtccctgagtccactccaccagctttcatgggcaccaatgagtcagctacaagtatttctcctctattcggtttaaacccagataaaagtcatccttctttgaactctgccagccttgtatcatgatttttctcatcacattttaagtggggtggctgtgatgatagcatcctttcaaaggctagacctttgtaaagttaccctttaggtccagcccttgtaagggaagctactgaccctgccttccaacattaccttcatcagatgggtgtagtgcccttggcttcgaaggaaagctgactaataagaagagcctctatagctaccacacaggactcttgggaaggatgcagattatagtagataaaacgtgacttcacttggatttaaatcttgcttcttgtggagagagactggacatgttgttcaagttcttttggcctcagtatatgtgatggagctaatagtggcttcttggtagactgctgtaagaattttattcaatatagggattgagcccttgtgtacagtttgctctgctagagtgtgggggaaatccatgccttttgggatccatacagaaaacaacccatgaactactgaatagaatgtcagatagcaaagaataagaatgggctaaggaaacttaaagaggagaggaggggcagtgctgtgtgaggtggccaagggaagcattatatctgcatgagatgaaggagcagaggttatgcaaagcccggaagtgtagttatggcaggccaagaaaacagagccagaaatgacttttctagactggatagtgtctcttcccaacagacgctatatgtagaaggtcaaacccaagtggaactctgtttggaagcaaggactttaagaaatcaattaaggttaaataaagtattaaaggcaggctctggtatgatgtcctcataagtaagatatacagagtatattctccctgctcatacatatgaaaggcaggtgaagacccagggacaaaacagccaccaataaaccataaagaaaatcttttacagaagccattcctgaaggcagcttctaacctctagatccatgagaaaataaattcctattgtttgagtcatccccatttgtgacattttattaatgacagcctaatcaatggctctgcatctgaagtggcacaaaactacaaaggagttagtgacaagagaggggaataaagttcacaggaagcagccagcataccttcgtcttcactgggagtcaagattttattgccaagggttggattattttaaggacgtgctcaaaaatgaaatgttcctatgtatcttctggagagtctctttcttctgtgtgaagaatttatgctgggctagaaagtatggcccggggagcagttggctggactagggcttgagcctcctgtagagaaccaggaagacatgggcataaatctgggaggttgagctgtcataattcggtgatggattggatatgaaatgagaagcagcgagtcaggatgactcataggttattgcactgagaagatgagcaaaggatagggtgtttgaagcgatggctttgcttatgtctagatgctgtctccagacaccagcaaggctcttcctgtcctctcttgcatgtcattcctcagatgccacctttgtgtcccagccttccctggcatcccattttcccctgtctgtagcatttattgccatcaaaggcattatatattttactaacctatcccaggtatgtcttaatttaggttgggcagcttatagaacatggtgttttgtgtgtctttatgactccttgctttactgtgacagtgttattaccagcaatatttttttctagttctgttcttatcacacccatgttgataatgtttgatacccaaaatcgacagggatatggctatggtgtcccgagatggtaacataatcgtgtgctcttgcagtgatcagttatcatgtgaccagatggatgcttatgctgcttccttgttctttcacagacatggtctttgtgctgagcatgaattccattttgtattcaacggttgcaatcaagcaggggctgtaatcacaatgatgtgtacagcatgatcaaagcttttatatcataattaaaaccacatggtaaatcatagcaatccacattaatgtttaatcaatgattcattttacttagatgcttgtggcaaagaaaaatcaagttttggtttaaaaggagaacatctgaatttctttttacttaatttagtcttctagtatctattttaatgacaattttttactgtattctttacttttcctttttacacataacaatacttcaaagaatgattggctttttgaaagttcttttgaagtaaaatgatattggcatgagtataacctaatgttcttatatcaggagtattgtgtggacttttgtcttagcgactgagaattctgagctaatgagattgtggcggtgttttcattttgttttggttttttttctccataaaaagtgaaataattattggttcacttggtgaggagggtttgctatattttgtgagaatgctctttggactttatacataataaagcattctagaagaactagtctatcttctaaggagtatatttttgcttttaataaacatatattttgtaagaaatttttcatataaagtgaacaagattagacttaccactcatgagatgagaaatttcattctcattcatttagaccattttaacaaaatgccataaacagagcagtttataaacagagatccacagttctggagggaaagccactgttcagtacttactaatacttgaatatttctgtatggataatactagaagtgaaggacacctcttagtctgttggttttgtctcatgctgtgttgggtgtgtgtcttgtcttcagtgcctgtcatcttgcctactgatccttgtttgcttttccactgctattttccaggtctgtggcatcttacatctccccatagccttgcagagacagttcatgaatcaccaaaacttccattcatcattcaccaggctgcacttgttacctttcagaactttcaagttcaatccaatcaagacccatttgaagttaccctttactagaaagtagactatgaagtttctagattggcctttttattgctcacaagctttcatgatctccctgccttctttttccaaccagttgtatacttatacactactcacaagcacacacagagccacatgcacacagacatagacacagagccacatgcacacatacatacatacatacatacatacatacacacactgtgctttccagttacattgcactatgtttggcatgctactctggtgtagacctggaagttctgctcattctgaaacctccttcttcatccttttactggactgctttctaaaatacttggtgggaatggatagagaccacacaaatgagaacaaacaagatatgtatttaggttttccaggagagttggttagtgtctcttgtattttggcagagactctaatgcaggtagagatttcagattaaaggggacagaggttaagcacatgctgaagggtggttgttgacttaaggaagctagagttaccaagaagtagggaccaggcttcgttggtttgagaattatctctgccttgttagtccttcatcgaaaggaagaacagaaagtagagaaagtagaccctgttaactgatggctgatctgtgactgcctatttgagctgaaggttactgacctgtgctttggttccagtgggtcactgcagaccttgaggtaagggctctgttgtcatgaattatatgtgaacagacactagccatttgcatgttcagcctcttattccaagtcagtaattgttgagtgtgtgaatggttttcttctcccatgcccttttggtcaggttttcactatgtagccctggttggtttggaattcattatgtaaatcaagctggccttgaactcacagagattagcctgtctctgcctctgaagttccaggattaaaggtgtgcaccaccatgcctgtctataataataataatcttgtacttaaacttccttatatctcaaaacactatgcttccctttgttattttattcatttttttattatttccttgaaaaatctttgtgcaatgtatttttgacagcattcactccttcttccaacttctttcatatccaaccccatttcctaccgattcaacagtgtccttttcattgttaagttaaacccatcaaatacaatttgtattatgactatagtcttgaatctgtgtccttcctcttaatgcatacaacaagatgctttcatataagtcaatgtaatttctaggaaaagtatgatttctggaccccagaactttcttcagctttacctttcattctttatatcaccagccttagctgcaccaaatttattcatgttctcttttttggtgcatgttattccttttgcatatccaattcttcccgtttgacttattcagtgtgcctgcctggaatgaagaaggaatgaggttgtaacttcaaactctcatatgaaaagttcttttacagacagggaagctgaccttcaaagcaaacttttcccacttaatggtaataataacataccacccactccaggaaagaaatcattcagatgaatgaagtaatgtttgtacagggtttgacactccacaaaatattctaataacacagtgcctactctttgaaatgctcagattttatttcaatagaattaaaaagccaatgtaaaataaaatgtgaattgcttgtcacacttgtacatggaggcacggggtgtattgatgccagtagacaatttaaaagctgggttcttacaatgtttctaatgagtctggatggtttgaaggataggcaagggtggggtacacagccatagacatttagttttgtttttagaaaaccagtgagctacagcttggaccagaaaatcaattgtgcagaaaagttcataatactggcctcagttggaaagtattggcaaagcaggttaatttcatctttaggcatttgcatagtaatggtattgggtataaatatgcatctgcatgagaccattctttttctttcagctttatcgcttggatagggattaatgtcagtcttggctcatcattacataataaattattgatactggatgcagattgttttctcatgtttgggtcttttatatctccatgcttgagctgcatgcagttgacaaccctcactctctttattgttcctggaaaatgttcacttgaattttatatatcagtttagttttgagtagagaaggatttttgaataatgtaatgaacattattgggtaatgtaattatacacattcgtgtatagttatgcataatatgtaattatacttaaacacctttgacatagaagacagatatgtttaagccaattcatattgtgcggttataaagctcacacaaaactctgtcattgcaataatctaatatgcttgtttaaggaaaactcaaatgacctcaggtcattaagtccccacatgcagtgatcatctatagagaccacagtattctggatatgccctgtgggtttaaagacattttgcaaaccatttgcatggtgcaactaagatgacttctagatattaattgccgggagatgatggataactacttttctcaataggatttcccataacttgtggaagaactgtaatgataatgccttcttgctcaaatgatgaatctccatatgaaaacactccctgtgtgctccaatgattgccaggatctggctgagaaattattaactaatgttttattttcctgagccagttttgtttttgtgcataaaaaaaaaattatttccaagcttgttttctgtgaactaagaagtggtagaagtgattcctctataccctaggttggaatgaggtagaaagaaacatactgcagggcatatctcttttcttagatctttcatagttccctcatttttctagatttcatagctacagtaacatcgtgtttccatctgactattttgctaagagaatgcaaggacaactttcccacatcacctcagatcattcatattctctagaatagtcactctccagcaactgctagagaagtgtactgccccaagtatatccctcctgaagcttggcaaaatcctctaataggttgctctgcctatgccagcaccactagaaatagtgtttgctcccaaatgcccatcaaacttaagacagtggtgcagagagatagctcagtggctaagagtagctgcttcttgtacagaggacctggttcagtttccagcacgcacatggtaggtcccaaccatctggaattccaattctgggcaatctgatgcctcatccaacccccacagccccctgcactgtacatgatacaaatacatacactcagatgcatacctacaaaataaaatatacatttttaaaccctaaggcatgtgcattattaacataaattactgctgcttctctgctcagaatgatggtcatccagaatgcactagaaaatggataccagtaagaggcacatggtaaaggagcctatacatacacacatatatatatacatacatacatacacatatatacacatatatatttatatagttgtttctgtgtaaattagttcagcagtgatggaaatcagtatgactattcttcaaaagactaaatctaaaactgttatacagtttttgatgaattctttcaggaatcaaataaccatagaacaaggtgccattaatataacaatagacaattcacaaaatcaatgtaggtacccatcagcagatgactaaacacaatgtgatatggcagtaggggaaggatgggtcagtctcttgagttgtgctttgaaagcacaagcaccagtatccagtcactataacccatattaaaatcaaaattctggactcagtggttcaaacttgtaatctcagtgcagagaaggatccctgaggctgaaccttcatatatatatatatatatatgtgtgtgtgtgtgtgtatatatatatatatatatatatatgtgtgtgtgtgtgtatatatatatgtgtgtatatatatatatatatatatatatatatatgtgtgtgtgtgtgtatgtatatatatatatataaatatatatgtgtgtatatatatatatgtgtgtgtgtgtatatatatatatatatgtgtgtgtgtatatatatatatatgtgtgtgtgtgtgtgtatatatatatatatatgtgtgtgtgtgtatatatatatatatatatatatatgtgtgtgtgtgtgtgtgtatatatatatatgtgtgtgtgtgtgtgtatatatatatatatatgtgtgtgtgtgtgtgtatatatatgtgtgtgtgtatatatatatatatatgtgtgtgtgtgtatatatatatatatatatgtgtgtgtgtgtatatatatatatatgtgtgtgtgtgtgtatatatatatatatatatatgtgtgtgtgtgtatatatatatatatatatatatatatatgtgtgtgtgtgtgtgtgtgtgtgtgtgtgtgtgtgtatatatatatatgaaggttttttttttccccttaagaagtattattgaattttctgtgatttctctgtgagaatggcagggagctacactctgcggtgatcattgtttctttgcagtgcaaattatctgcattcagcttagtgccccacactgtcttcctcatctgtctctcagatttttggaaaaatccttgaacctttcctctaaactatttcatttgagctattgagtggagcatgagtcactggggactccactgtttgagttgctcgcagggggaggggcttgtggtatggggaagtcggtgaagcaggctggctccaggaagggctttgtggtaagagttctgctgcaatggtcatgggttcactcaatcctggcacattcttggccagcggctctttgccatgtggagatattgaatattggacagggagccagtgcaactgaggaacctaaatttactttaatgaatttggtctaatgaaatgaaatttaagtagctaccccccatttgcttcccctgaagaacttactcctccttggcgtttcctactcttaaggtcaggaatatctaactgctcctgattttctcagaactcttcaaatctttatagtttttaaaaactaacacataaagattgtacatttttatgaggtgctatgtagtttttccaaagctgtaaattttacacagtgtttcagttaggataagcataaataactactaataattagcagttctttgtaataaaattttaagttccatgctatagctatttttaagtatgtgccattgttatctttatctgaagtccctctccatgtaacagaatgcctaactaattctgagtcctgggtgaccaagttttttattccctcttctctatgaagcctttggtaacccctgttctactctcaacttctaggagacaacccttttttttagggcatccagaacttggcattgagtcaatgcatcttgtagattgcattcttgttaacagacatggtctgtggttacagagaagatgcataggatggttggaagtcacaaagacttgactttgaagttacaagacatggtaacttcattgtcattgctagatttgcctcaccaattataataacgtttctgacaaggtaattcatcgtctaagcatcagtttcctcatcttaaaatagcaattgtgattatggagatataatgcttggctcacagacttgctgtgttgttcacatgagatttttgacacatcatttttttatagtagactttgctctgaaaattcttggttttgtcaatatgagcacttttccacattcacattattttggtgaaataatacagaaagttgcttagacatagcaactgcctaattattagatcaaataataacataaaagctctagaaatgtagtctagacttaagagtattgtaactggtttggtcccagcactaaaagagtaacaaaaaataatgctaacaactgtgtgcagttttatattttttctatgtgtagatggcagtctgatggcctggaagcaatgttttactctcattccattttgcatggaaataagataatgtttttggtttgggtttttgttctcgaatttaattttatcttccaaaaaaagagttgtcatacatatcatggtggtaacatatttatttggcataacctttctttaccacacacagagacacagacacagacacagacactgacactgacacagacacacacatacaaacacaaatacacacacacagacacacacacagacacacacagacacacgcagacacacacacacacacacacacacacacacacacacacacacagcttttatctaaagctttgcttccctcatgggaacagcaaactacaacagctagatttcgtgagtacaaaagctattctaactactttccatgcacaaactcatggaatccccattgaggctaagggaagctttaagttcttttactttctgccttggtgttgagttctggaaatattgatagtcctcagattccttgtaatggcatgaaacagccatccagtgacctttgtcctgtcatgatttatgtatggctggaactggcagcttcaccatttaaagatgattgagtaagacatattgagacattctgagagagaacagattgattttgtatttcttaaagggcttctaccgtataatgtagacattcccttttatatattcttaaacaagttccgtagatcttattaaataattccaaggctttgtttaaaccttgacactgcagccaaccccacttcctctttgcattcatcagcatttctttattgatatgagcctttgttccagatgactttttaaaataagccaactaagctgtatgactataaaagcgaatgggatatattaacaatcacgtgatacagagggagttttatatttgtttctgagcatctgtgggaagtagtagatcagagaccactgtcctaacctactacatgatcctcttgcctactaacaaattaagaattcagagcaaaacactcgatttttcctaaccatttttaggcattaacgatgaagtaccattgggtgcccactgagcagaacgctcctagaaagaatctgttttcgagaataaaaatacaaacaatagaaagagcacctttccatgtcacttcaaccttgaataaatgaagaatttattatgttacttctatttgtgtaatggataataataaacatttgtacaactaccacagctttctttatcataagaagcctctggatgacctcttatccctccttgtcatacccaccaaggtagtcatccctgtgaattcttgcctattttcctcatctttttctttatggatttatcttataccactgatttcaaaaccatattgattaatgtttacatatatgcacatatttcttaaaagtgcataagagatctcccatcgaatccatgcactagtggaactcaggcttttcatagttccagttgctcacccacaaatcaggcaaattgatcctcaaggccaatgagactacagccatccttaggcaatgtgctacaaccagcaggctccagggactgacttgacccaggtggcaagagaatgaagaaaagacaaatacagggatacagataaaagctcagaacaggtagacaaggctctctgatggagaagacactactctgatggagtagataagtttactgggtgaggagggaggtggtggtggggaatatttagtctatacagctgaattaagaaagtgaggtttatggtatacagctgaacaaggaaggaggtggagttactacatacagataagtaaggaagcacggttattatatacaaatgaatcaaagatgcaggtttagctaatccagtaaggagtcgtctctataagggatcagtctgaattcataaatattcatggggagaaggctatggtggacattgtctgcacacactgccaacattcacacaagagcccaaagaagttttagccatccaggacctcacccaagaaaggcactgccattcttctctagctgtggcacagtgggtccttgaagtggctgtgcccttgtcaatagcacatgtttgcttggggcttcccccacaccctacaatgacgacttccttggcatccatatctcataaggccattttgtttaatttcatcttccagctgcaaagctatatgtggaacctgagctgagttgtcatactgaataagacaaaccattcgtggcagctctgtgcttgcctcgtataaggctatcaactatgattttcttatagttagtcaaataatgccaatgtgatgtttcttctctatcctttttgtgtgataattaaacagattaggaacaaattaaggagaaaaattattgttgagacttcttatttgtagatatgacctcctttaaaaaaaactttggggttctaattcataacattaaacagtttctctcaaattcatttcaacttactgaccctacagcttgggttttttttaatctgcatcacagtaaaataatcaggtaggatcacattacaggtaggctcttctgagtccctaggtagagaggcatgtacagtgtgtggcactaatgagtcagctggcttctgtcattgcagagccattgatgctcacagtgacatcatcttactcatatttcttcagtattgcttccagagtctatccagcccaatatattcctgtactcaacacatattatatttctgattctgataatcataaaaaagacatgaaaacgcttaatacgattctgacttttaactccaaatctgaattgagctctatacatagccacaccattttagcgtttaccatcttttctattctcaatggcacgtattggtgttggtgatgtgactaagactcttacacttgaaccccagaatcaaatcaggttcttatggaattattgctgctttctcagcaatagtttttatgtgttttacataacgtcattctgaggacttacacaggccatctttggcaggacataaaacctgttctttctttcttccttctttccttcctgcatttctttttctctttatctttctgagttttttccaaggtgcctttatagtgtgggtttagttttatatcagaatattcgtcattgatttgtacaatttgactttcaatttagtctctattttgccatgttagctaatgggtagcatgcagattcttctgtctgcactctttgcatgactttaaaaggaatttgactagactgctcctatttatgattgaaacagatgtgtttcaatgataacaatatgaaaaagtaaactaccactatacaacacaaaacaaagggatggaggaactttgcaaagatggcatagaacatagaagtcaagggtgatgttcttcactctgtggttccccttcatagcagcttcaggagcagatataaacaataggtgggtaattgtgtgcttagaggatattggaagaaagaggtatgaaagagcctttttaaagtaatgttctaaatcttgatctagcactaactacacaattatacacctacctgaaaatttatgtttgcataatttgtgtcttggcttttactatgtattctcacctataaagaaaatgttcacttaggttacaagtgagtttaatgcagtgcttgtgagtgttgattctacaacacagacaattagcacctcacaaagctacattgtattaaaggtcttttatttttaaaacagagactgtaattgcacacatgtttagtacttctgaggactggaccagaggagaaaggctctaacagagtctacatgccctgtccttttttatttttggtttcacagggtgtcttcctgagttttctaggagatcccctaactcatggtatatctcaggttggcttagaactcaagagccttttgagcagtgggtataactgatatgaacaaccatgtccatttgtttcagctttgatctgaagcttaagccgagtagtgagtgttaaagcatttagcatcgtgcctgccacagtacatggaagttgtagtataatttcttccaaaaatgtgatactctttcaagcattttgttatttagacaaatgaataaaatgaatcagcaaatcaagtatgtttttattagttacatattagttgctttgtaatgataatggcaaccagcattaagcagttttttctagtaaaaagattttctgtatgtaccatctaattcaactacccataatggtactttaaaatcattaccttctctttattttatgaaggcacaaactggcataagtagtttgttttgcctgagtggggtagtcatgaaatggtagggaaaggctcaactcagaaccatttatcttccttattcaaatctaaggatataataaaaccacctcctcaactggtacagtgtcctccttcaggatgttagagatgatggcacctgaggtgacatgattcagggttgctggtgggtggtgaccttgatgataatgatgatgacagtgacaataattttgctgtgatggtgacccacatgtgagcacccatgtaaagccaagcatcaggcagcttacagtcacgtcacagaacttgggttgttttcactcaggaagcggggttgatacagtcaaaggtttctcaagagacttcttacagtctgacagcacattcttggaagataattgcatggtagaagagatatttaaggaaagaattcagattccttgcagaagaggcctgtagcagcctacttagactagttatggcagggtgtactggctagttttgtgtcaacttgacacagctggagttatcatagagaaaggagcttcagttgaggaaattcctccatgagatccagctgtaaggcattttctcagttagtgatcaagggggaaaggccccttgtgggtgggaccatctctgggctggtaatcttgattctataagagagcaggctgagcaagccaggtgaggcaagtcagtaaagaacatccctccatggcctctgcatcagctcctgctctctgacctgcttgagttccagtcctgacttcctttggtgatgaacagcagcatggaagtgtaagccgaataaaccctttcctccccaatttgcttcttggtcatgatgtttgtgcaggaatagaaaccctgactaagacacagggcttggagatatcagcgaacaataaagcaaattcacggttagagtggtgatgccccccaaatggtcatggagttgaatcatatttttgaatgttttaaccattattattgaggtctttgatgtggaagtatgtctttatgttaaaccccagttttatagaactataatactggttaatttattaaaaaaaaaatacatgcatgtaccttggagcattgatattgactgaaagtgctcaagggaaaaacgaggaaacaaaaacccaaaaatcccacaattctcattaaggaaaaaaagtcaaacttttcatttctccccacccttcttttatcccagagcagacttttacagagttaagacagatgcaggggtcacatttggtacaaaacaaacaagtatagagcaatattaagaaacggtttgcacactgtcctccactgttacaggtgaacagtgcagtgatttctgggtgtggagttgtataaccatcatcccaatggaacttgatttgtcaactttgaaggacactgtgcactaagatactactcatttgtctttaggttctcacagaatgggtaagcactacttgactttcttctccagaattgcctgttcttatcatttgaataatttagtcatgttatagtgtataatgaatgactccattcactggcatcaagttcactgtgggcctgtgtaccagaggttttccatggagatctctggtccggccttgtgccaaagttccagctaagggaagcaagtgcaggcagggaggggaagtcgcttctgtcgcttctgctgctgcagttggcaccacctccatctctgccatgccttccgggttactcggttactccaacattctgcactgagtcaagtcgggctggctcaatgagagaccaacttgacagtgaggagtagggtggagcttcaggtggtactttgggagagcagacctcttcccaagtgttacagctcttagaacaggagactcagacaatggagtagttctcacacacctttattcctaagataagattctcatatacagttttggggtgggtaagtatctgacaacaggtacttcccattggtttggtctgacagctttggggaaaccttatttgcatgtgggagggcttgatgctgctcctttgtgactgatggccacatacctctgtgggaggctatagctgcaacaggagggtggggcaagaggcatggccaaacacctttggtcccatgcaggcagaaatcaccacccacagggtcactgggttacagaactctgtttgacctgggaccaggctgtctgtgcacagctcacagccccagagttcactacattttatagtcagataatattttaatgactgggcataccacattttatttatctacttatgtatggactgttgggctatttctgttctttggctaagaatacattcatatataattgttatgtagatattatgtaactggctcttaaaaactgcctttgttaaaatcattgcttcccaactggttcacaagaccactgacagcaaaataagaacctgaaatttgtcttcattcttcatttatctcttttcctttagagcaattacccatctttcacatagacatgtgaatcaatcaaagaaagtctatttggcaacccatgatacctactaatcccattaccctcaggtccaaagacacaaagatactactggaggcttctgctgtcagctttttaaagtatcaagacttggaccttcagaaggcatatggttctatagctgtttttctgggcattcagtcaccttggatccctggaaaagcgagcctcataggatgaccatatcacaggggaattatctgtgatggtaaggtcttactctggagtagagcaaagcaacagaaattctttgtaccaatctacagagtcagaacagaaataatgatctaggtctactggattatgtatttctcttgcctcttgcctcttgcctcttgcctcttgcctcttgcctcttgcctcttgcctcttgcctcttgccccattgcttcctcttcttaagttaagctcttgtcagtaccatgtggatgaacttagagttactggagccctttattccttcatcttcccaaacacatttagacaaatttactgacatttttgaccctgctaagctctttaatggcatttggagatgggtgaacaaactattttagccagttggaactgatagacctaaaacttcagttaaaatcttcaggagtggaaactctgggccactatacttaaaccttaagaaactgaaagactgttcacatcccctccgagagggaccatatttgccaagattaatatatttcttatagtaattattgaagtgacattggcaaaaggaggtaaagaaagcagagagagaatgtaataaaatggaatgtttgatactattgctaattctaaccagttactaacaggctaacatttagtatactagttacaaattaccatccatgtactgattctaacagaatttctcactcccacattgtttgtgaaattgaattacatgtgtcccaagtcagtctgtgaaatattaattggtttaatatcaagaggagataggaagtttactacagctggggaaacctagactcaatacatagactggggagcctgtggtaaacatcttctttgggcttttatctatgaaaggacattatatgtgcacttgtgggtgacatgaagctctttcgttgccttactactgttgtttgtgacttgtgctgtacagaaggcaattaggagagcgtcacttccccgatgttaatttctctaaaatagaagcttactgacagagaaagctgattgtgacaagagggcaggtattgaagcccagatgaagaagcagtgattggtaactgcctcccacaatgtcagaattagtatggacaggattgagtattcactaaatgaaaaccactataattaaacataaaagggagaaagaagaaataggagattgaaccaggtaggtcatgactcctcctactggctggcatgttatttgtcatcagagttcataactggtcccctgctaggtgagctgcattctaccagcagtttttgttgtgtatttcaaagagtgctaaatgtaattcacgatgcttctaaaggtgtgtgttttgaatagccctagccgggggctgtgtttcagtagaattggtgtttcctcagtaattttatcttagccagcttcatttagatcatgttcaaggaaaatttgtgatgagtttgctatttctcataagtttaaatgaaagaagatatttctgaaaatagcttaggaattaagaattttttagtggctctctcactctcnnnnnnnnnnnnnnnnnnnnatgcagttggggagactttggtcagtttccatagcttcagttgaaatattctcattctgcgtttatgatcattttactctttccctaagaaaactagaaatgtgtccattgggaaatttaacacttaagtttttcttggaaaattcgctcaatttttgtttcaagcaaaattagcttagaaggttcgattctgcagatgacatcatggctgatgttatgatctgaagactttgtggatgctattttgggacaagttacagcagtacctcaaaagaatggcccttttctttcattgtttgttactgtattatgtttactttgacttatatattttgtcatgtctcttacctactttactgttttgatcaaaatgcctatggtgcctctgggctgtcaagtagaagacagatgtgtaacattgcctgtgcttggactgcctgctgcccaaccatacttgcccttgagggaggtgaggtagagcagaatcaaaggcaaaggctcaaagagcaggtgagaaatgcctctgcaaactcctttaataccctccactcatacccactggtcccaagaaagcatcacttctaaagagcgggtcccaactgtccagcattgtctacattagcaatccttggtttctcaaacagtcttcaattaagtcctcttttaggagatgactttgcagctatgtggcctcgctgtaggccgccagcatttatgcagaggccgctgtgcagttcctcctacctaacataggctgctacctctagccagaccattgatatgccatcattatacaatgcctgtccagaaggagaaactgtcttcttcactgaagtcttgtagtcatcttaaacattttggagagttgaggaatcacagctatgagatcatggtgtaagacagggcctaggagagagactatggtcctctctggtactagatgctctgaaagctaagctctctatcatagtacctaacactagagaattatatgtatgcatttttgtattttatagtgtctttgtggtgttgaaggaacttgagaccttggtttacccagcaaaatctcattaagttataagaggcaagaacatgaaggattaccaattgaaggttatttttgaatatacagaaatactagtttctatgcactgacctaaagtcaattgcatgaacactcttaaccacgaagtacactgggaaatgttaataaatgttcaggaagagagtgtgggctttagagatctcatgatgtatctcagacacacattgatgaatgtttgctcattcatgtttatgatcatcttgaaagcaatctgaataatgatttggagagttatctccaaagttatacattcatacacttattaattattcacttaaatcaaagcctaataattaagatatctccatgttaaacaattttcttaataggttttcatcagattacttcacagatgttttttatgttaccagaaggcaaattttattgagcaatagatctgttctcactttacaaaacaaacaatcatttgtatatctccaattttcctgaatgtcaaattgagtatctgagtttcatatgtagttttaaaaaaatcagttttgacagcctagccatgttagcttttctttcacaaggtaccattagcaagaaagagatttgaattacttgctgtcactctagggcgctaatgggaggaaatatccagccatgtgcatagccactctttgaaatagaaaatgacatcatgtaattggctttgtctgaactgctcagtgggtgaaaatgtgattcgggaggattaaggcataatgtcattattcttgaggtgaattctcacataggccaggccatcagcagtcaattattggaaccagcttggccatataaaccctttgaccaacttcactcccatgtctacaacgtgcggactttcttcttaaatggaagttattagaggaaagaacatggaaggctatctctagaaacaagaattgttcacaacctctagacggctactaagaccgctaagagacctcttttggacaatgaattccttatctgctatggtcttgattcctatcagccctttacctagcttgtgtatatttggcaccaacattataacagcctttagctcattctcagtctccagttgcaaaaagggttagaacttggagatgggttttatttatttattgaccatgtaatggctactcaccgtatgtctggttatgatttagatgctgaatatagttatgaataaaacaaaattcttataaataaaataaaacctaatgtcaggcatagatacatagggagaagatatagtggagcgaaatgctggagaataaggagagtgtgtgtgccatggagacggtgctgaagaagtatcacatagcagcagacacctagataaatggaggggaaaacactgtggctatagggcaggaaaggaatgcaggtgaaaagaaatgcaaagggtgaccctaagtcaagagggtgctgcaaagttgagagatcagtatttgcatactgttggcaggaacgtaaattggtatagttattattgaaaatagtatggaacttcctcaaaaacattaaaaaaatagaaaccccaagtgggcactcttagggtatattgtcaaaataaatccatcaggatgttgatggggcatcttctctcccacgttcattgcagcactagtcaccatatctaagaaatggaaacaattgtagtgttcatttattccgttggtaggtgaagaaaatgtgctccaggtgtatgacagaatagttctcagccttaaaaaggatccagtactgcctgtgtgacacctctgaaatgggacattgttgtgctaagaggaagaagacaaagaaagacaatgagccaggttcattcatgagtgctatctggaagagttgacctcacaggagttgaaggagagtcaggttgcagagaggcagtcatacggaaaggttatcagttggacagtccgttactcttagctagtgaattctttattgatcacattaaataactcatcgtttgaaactattaacaaaaaaaaataaataaataaagatcagtgcctggagagatggtgcagcacttgtttctcttccaggggacccagttgggttctcagagagccatcctgagttccatttgcagagaacctgacacaatcttctggtctgctctggcactacagtgttgtgtagacacacatgcaaagaaaacacatatacacataagattaaaataaatctttaaaactagaggtcattaagtacgactcagaagagaacgatgggtatgtttgggtgagtccgaggtgcagggagttgtcctagggagtgtctcaccattgcatcaccacagagcacaggaagcagctgctcaccttggagaatccgggctgctccacaggagatccttgctttgctttgtctataccaaacaggaaaggatgcaatggctccctgtattctgctaactccttctggccagatgctcgtgttaattttcttaagtgctatggatactgtactaacacctccctttgatcaaaaacttaggagaaacacaagagagtgtcattaaagctgcacttttccagttttaatgagcccccaaatcatctttaaaatcttattaaaatataaattttaagtcagtgagtttgggggaaactaaaatgttgcatttcttgcgaagttcctaggtaaggccaatatattgaatctctggaccactcttcacagaacggtcagtgtgtttgttattgccttgaactgagttgacttttctgtgtgtgtgatgtccaaagagataaggatgttatatattattcagacaccaccaaaagcttgtagaaggaggcacaacctcctctccccccttatatcgggcagcaatcaacgattccacagttacattattcctttatcctgaaggactattcaaacagcagctgtagagaaaggatccatcataaagatggtggtagactccagtttttctgaaattagactacattttagcttattcagcaggttctaaaaagaacagatgttcaagatcacccagaccaactaaatcagcatcttagcttggcctgatgcatattctgtggaccagaaacattagcaaaccctgctggcttatgagacaaatgaacctctcctgcttcatctagatgcttgaacccaatctaccattttcgatctcaaggtcaagctgaaatacaattcattttaagagatctctgcaagaagtatgaaagcctgatacttgacactatggtttaaatgtaaagaattaataatgccctttctttccaagttgtgtgggtctcagcctgttactaaaagcaaatgaatagcaaggctggaatgcagcagagcttatttagtgtgaatatggccctgggctagaccttcagcactgataaaacatcaaaaacaacagatttatccaactatctggatcctgctatttttcctgatcctgtgacacctgggttggtgtataattatgtctagaaacttatatgagtttcatgtaactacttatcactggttccaaccatctttgcctcctccctgttctgtgttcatccaactatcgcctccatagtctcactgattttttggtctggatttaattctattgagtaaaagtttgcatgcagggagatgaattttatggatattgtaaacactgcagaaattcttctaattctttattggatgagaactagttgtaagagaaatatatttaaattataatgagttttcccccaagagtgtggattgtggtgtctgtgacattgctcaggatataaggctacttgttgctaagcctgaagacctgagtttgatcatggggacacatggggacacatggggtggaaggaaagaaccaactcctctaggcaaccctcctccatccccacatgcacagtaaataaacatgtagtagtaacatattttaaataaaaggaagaaaagaaaggtatggattgtgagatttctttgtagttttgttaatttcaaagtaccatgtgagttttgttaagtgttagttctgaaaactgcttctagctactgatgtccttaaatatgctaacatgagcaggtttcttgtttttttttgtctttgtttttgttttgtcaaattaaacatggccagatttatttggaagttttatattggtctttcataaatttcattctgttatatttgtgggaaaaatattgctgcacgagccaatttatactctggaaattatgcccaattcattctataattactattttggaatgtatgtcattattaattcttcagtgtagaaaattgaacttacaactataatcatgactagcattctttcttttggagtcatagcctattcacaagaaacacatattaagaatgctatacctgacagtttatatgtttcacatctttacatttattatcaaccttatatattggttttagaatgctaatcaggaacaagttagaaattataaaatacatataagacatcacatttacatgtaagaatgaacatttttatttgtactgtagatacagtaacctgcatatacatgcagggcattatgaacattgatagggctgaggtctatttcagaaggtatagtgtttctcaagcttacaggaatttgtaacgtgttagcctacatgctttgcagacattgctattgtgaaatctttgactggtcactaaccttgccaagttgtgagtgggtaatggtgcaagctttagctgtgtttccactaacaggaaacattatggaatataaaaatcttcacagactacaggcactttagtgatatgctctattaatcacttttccatcaccagcccatgcttttttttagattaggtattttcttcatttaaatttccaatgctatcccaaaagttccccacaccctccccccccactcccccacccacccactcccacttcttggccctgacgttcccctgtactgaggcagataaagtttgcacgaccaatgggcctctctttccactgatggccgactatgccatcttctgatacatatgcagctagagacacgagctcggggcgggggggggggggggtactggttagtttatattgttgttccaccccctgatatagctgtctcttgtgagactatgccggggcctagcaaacacagaagtggatgctcacagtcagctattggatggaacacagggcccccaatggaggcactaaagaaagttcccaaggagctaaagggatcagccgatgcttttagtgctgtcattcaatcccaatttttcttttgccctctgtttgggctatggctaaagggggatggacttattagtctgttccattttcttaccatatggtatgctctggttcagtcagatgttactgacataatgacaaagcaattttatatctgccttctggtacagatgttctctgacacttgtcatccaccatgagagaaatgtgttctaagtaattgctggtaagaagggagaagtttgtatgcacaaagtgcctccatgcagttctgtcttagttctaggattttcagagctagaagtcccctgagtttatggtggctgtggaataaataaccagctacaggttgggtgagcccctagataatgttctacccctttctaaagctttgctttaggacaagaactccatgacaggaatggagaaaggaaagtctgtggcctttctcatctcaagtccccatgctaatccaatgtcattcagagactgaagatgcagtacaatgacatcactaggccagcaggagaaagcaatcaccaaagggtttcactgctctgaagtggtgcctgagcagctgtcagttcaacaagatggacaacacgtaaactgaggggcatggccaagctcatactactaaaaagtaagccagaacattaaagaagaagaaaattacagtcacagaaaacaagctttgtgcctgagagggtgtcagtccgccagtctaggcagggaataacgtcgggagcatgtcagagtcaagtgtaccaccatgaagtgaacaggaaagtaaaaatacaaagggagggcatggaccttgaagccctagaaaggtgggctgcatctgggggcgggaggaatgggaacaaggtgttccaggagacatcgtgagaaaggcaggtttatctttgaagcattctgcaatatgcctgaagttcttggaaagtttttcgtgtagactgattgtgtctttagggtgtggtctatgtcatcagtagtcatagcaccataggacaatggtttcttatgaggtcctccaagctctaactagacataccctgactatctgatggaggctgaatggaggagacaagagagcaatgcagttctagaaccactgtggagacaaacctgatgcttatctttacagtagaaaactgggagaccatagacctgcacctggagcataaagaagaattcaaattcatgctgaattttcaacactaaactgggatgcattctattcatattgagtaataaatttttataatattgtattgcaaggcagacatcaaacccttcaggtatttgttttcaaagtgtcttttgtgaacttgtcttataattattaatagggaaggttaatgcataatgcactactatgataatataaataattttgatctgtttgattgtttgtttgtttgtttaaggtaaggtttctttgtgtagccctggctatctggaaacttgttctgcagaccacacaagctttcaactcagagatctgtttctgcctcctgagtgcttggattaaaggcatgtgcctggatgttttgttttgtttttgtttttaacaactcctaatatatatgttttattttgaaaatacttttctctcagaatcccttatccaatatctattgtacctttcatttatccagcattaaatatgcccactgtcttgtaattatgtcgtgtctgtaggactccatgtggctcctagtatttaatctaatgttattagctgaaggcttagggagtacatcttctccttggctgtgcatttaatgtacttcatgtcagttaagctcattaagactccctctaggataccttctataaactgtctttacttagaattgaagggcatttctttagatgtgaggtattttgaccaccttctaaatgccttctatatgtttcttcatccttcacctgaattatataagagagaacatcatggagtttgcactcaagaagtaaatcatttgaatatgtttttcaatctgaagtccacaagtaatgaatgaaatcaatcgaaagctaatactttctctaaatgtattttttattatttttatcaagtcaaagtcttgttgaatatcatcctatgaaaaactagaaattaaatacaaagggatcttctaactttcaatcatcatttccgattgatgtgaatgttcatgaacatctacagctttagaaatcattttagtatgcttgtgttcctagttttaataaaactcatttctctctagttcaatttattctgtgcttgaaggagattgtattagatctgcggttctgcaatcctatgataaaattgctttattttgtccagcttcacaaactggcatatccattaacttatagcaatgaatacaaagaatatttctctaaaaattatttgtgtaacatccagtatctccctcttactgaaaatgattgtaacaatattttcaaaattgcttggtggtcggtttggccaatgatgtctaatcccaattgtaagaaaaggctttgaaacatttttttttttaattttgaaaacacagcagcacttcttatttaccctgagaaaaataaaaggcaatttaattacaaaggatacaattttacattttgtaaaaaaaaaaaaaatgtagtttaatgcagactgcctgccaagtaggattgtttacaatagagtgggttttaaaagcatgctcaaaacatgtccgagagcagagcatggggctgcgagtgactaaagagctatttgttgaacccacctacaccttcctaattcagtaagagtggttccttgagaagaggtgtgggacattatgggggaggttttccctccgcttattttgaaacctttattatggctgttatttataggaacaataagaaatgtgatagaccaacgccatatttgattaatcagacccatataacttgagagaacaagtctctacaatagcttttgtattcctctttaacacatattcagctaaaataagtgaaaacatattgactcttttcctaattccttgtaagccgcctacagtaaactctgaatctgtcttttgtcctactctgtaatgaatgatacattatgctaccccagaagtgttgacacatgtgttgagtgttctgaacaacctcaccctgtgtgtggcaccacacgcatgcaacaaatgcacacaggatttcatgatgacataatgtcatatgccaacctatcaattttaaattgttcttttttaaatcaaattgttacaattagaactaagaacctgacacagtaaataaaattcttgtcttacaacacaggacctaagtttgatcccagaattgatgcaaaaaaaataaaataaaataaaaaatctcatgtgctagcatgtacttgtaatcccagcactgaagttacagggacaaatgggagcctggagctcatggtgagccatcatagccttaacaggattcagtgagaaaccctgtcttattctaaaaatagtagaataaaagttagaaagtatctaaggtactcttaaacatgtgctaatatgtctacacataccaccccatgtgcacctgcatacacacatacaaatacacatacacacacaaaattaatacagttagcattactaaagagaagttgaccctcagaagttaaggctatattaatagtctgtgccctagtcactcacctgatgagttcctcttggttggaaatcttacgaatttgaacagagttgttctgttgagtctttattaaaaatatggagctaatcctttaagcttacaaacaacaggagcaattgacttgaattttcttctagaacagtgcctgtcatcagagtaaaaaaaaatctcagctgcatttcatttttgcctggtagccacatacttctttcccaaccagttatggatgtacaaagctgcagtatagtctctggaaggcagaatgataccaagtaccaggcctagcctaggctagagaaagatttccagaccagttatagggagaattcattttacttaaaataccacacacaaaaaaaatctcacttctaaaggttaatatacagtttaaatttaaatttaaaaactatgtaaatatgcaatttcagaatcgtttccccaagctgagaggcagatttttaagtccatactcatgcctttgtcgtggccaatcttaaactctaaaattcttcattttcattgtctagataaacaatgttatagaaagtaatggtcctaaaaacaaagaatattttttttaattaaactatgtaactattgtttctggtttcatgtcctaatagataaaaggcagcagagataaagttgtaatatacaaattttcacaatgattacatgagagcagaaacccaaatagttcatgtcctaatagataaaagacagcagagataaagttgtaatatacaaattttcacaatgattacatgagagcggaaacccagacagacatcagctagggcattgtgggagtaaataaatgaaccaagagcaaactacacacatggagatctgatgggcagaatctcagggcctttacactctaccatcttctctactcagagacttttgctaaggatagctgctttgtttgtgcgcctttttaaatgtgcttttattttgggcatgccttttctgagcattttctggccttctggtcaccatctgtcacctccctttgttgtctttcgaacattatcacagtctcgcttgttcacttacttgtggagtctaacttatctttgaagttcaaacaacagctttcggacagtttgcactctccactatatcctccagtacacgattactttttatcagtagatggaaataagtaaatattcttatgaggctgcactgtggtcataatctctctggaagtctaaggaaagagaaagtctgtgtataattgcttgaaaggaaggacagttgaaaacctgcacttgggaggcatgatggcacacgcctttaatcccagcatgagagggggtgggggcaggtggatctctgtgagtttgattccagcctggtctacatagtgagtaccaggatagccagagacaggtaaagataccctgtatccaaagagagagaagagagaggaaggtaggagagggggaaagggagtgaaggaaggagggagagaaagggggaggggagggggagtgaagtggaagagagagagagagagaggcaggctgactctactactgggaatgattggtacagtgaacagcaccacagaaaagnnnnnnnnnnnnnnnnnnnnnnnnnnnnnnnnnntgttttctttaattagaaaacaaagcaacaaaacactcttgtctaacaggactttgtgtaaatagacaagtttgtatggttcaaatctggaaagttctgcccatcaggatccatccaaacagacatagatggacggcacagtgcaggactgagggttccagttggtcctccataaatctcactcctctctgctgggtgtttccccttttcttcttaaggatgagagctgtggcaggggggaataaaagagggacccagttatccaataaactgactgtcaaagcttatttctattttcttagtgtttcatttgtacttgtggtggtcatttttaaccttttgaatctgtggcaagctgtgtgtaaacgcagaagctataggaagcttcagtactcttctgatttttagggcagaaagaagttcacatacatggtctacattcactaatagttgagggtaagtgacaatgatgctgttatatgaattcagttgtcacctaggaattcattttgtctgtaagtgagtgatgttcttctggccctttaccaggaagctctgagaaacaatgtgagctggaggggaagcacgggagagccaaagagctccacctatgaacttgggcctgaatgaatagcagcaattccaagatgactctgggtccattattctaatgccatgatctgtacacatgtaagagacgctgtgttaaatacagactcctagtccagcccagactcaaagagagttccagatgtaactgtcccacagttgagaagaacacactgactgtcaaagcttactttctattttttttgtaataaaatactagccaaaatcatgttgcagggggaaggggtgttattaatcttaaagattacagtctactgtgaaaagtagtcatggaagaactcaaaaaaaaacctggaacagaaatttgaacatggccatggaatagtgctacttaaaagctcacactatggttccctaagattgcttttactatatactccaggccacctgtgtaggagtggttctaccaacagtgtgccctcccacatcaatcattaatcaagaacccatcccccagttacttacaggatagtctcatggagacatttttccagttgagagttcctcttctcaggtgactccagtttctgtgttaggttgacaaacacttaaccagcacaattgacaccttgtcaaattgacacacaagtatttctctattaaaccataggttgtcttgtttctttccaaaatcttgtgttaatgtcacagcataacacttagtataactttaaaagtcccacagcctttaaaattttcagcattttaaaagtgcattgtatattttataaactccaatttataggaaccctgatttcctataatgccaagaacaagttaatactttcttgcttcaagaaagaagagccgtggcacagtcataaatcaaagctaagcccaaggtcagaagtttaaatacttcagtgtttgacaccttgaactaactcatgatcttttgggctccaaagggcttgggtagtcccgagtctcagctctgccatccactgcaaatggaccttctctggtatgcacaggtgggttccaggccacatctgctgttgtctttggcagtcttcccattgtcttgacatctccaacatgttgggtctcattgcaactgaggcctcacattctccaatgacctccttgtctctcagagtgctacacctaacatgctctctatgatttcttcataccaccagttctcatctcaccaaagaccaggctacatggaagacttaaacattttcaagattgggtaccaacttgagatgtaatattgactcttctggaccatagtttctgtgtgctgaccatgaggaaacacttcccataagttttaactacattcatgttgatctcttattagtcacaaaggatttttccacctcaggcaattagtatcaattgtcccagcaaagcaaagggtttactttcgtgatactggtctttcacattcttcaggcctacctgaccagaaaccacaaactcttaatttagatgtagcttatggatggccctgatgaaatctttgctttcttttgaaatgctacaagccaggcctccatagtctataattctcccagcatttttttatctcccaagctctcgcagaatagccagtcaagctttgagtgtttaatagtttttccagacgaaagtttcaaacatttccacagtcctccacaaaatgtcgaagtcaggtctgtcacagcaaggcccatgagcctgttactatattctgacatcgctatgataaaacactagccaaaagtaacttgaagaagaaaagattttgttggaaaaaatattttaaaaatcgaagctcagggtttcctcccaccttaaatcatttatgtttctggatgaaagacacatacagccgttatattgttaaatatctcttaggcagcactatagctcagcaactgcctacccttggtgctgttagaatctaattttccatcgataacccaaaccatcactgctgctcttacctccaaccaggcagctctctggcccacagtccctagcccatggtggctttcctttctcctctcctgcatgggtgaatgtatataaaaggaatcctacatgagtcctagattaatacattattgttcatttgaatttctaacagggaaggacaaaatctaatcaacaaaataatgtttccatgtgagctaaaatgcaaaggtcgtgagagcaaccatcttaggtctttattgttcttagaatgcaaaagttctttcttctatgccacttcgttggaaacctctgtttttctcactcttatcagattggtcaaaaacaatggggaggttttggatttgactgtcctttggggaattcagactattcttgctaagaatgtaattcaggcactccacaattccagttaactgcctgagtcactaccaatcctccccctggggtcttaaactttcagtgacttggggaagggtgcattgtttggctttacgttgaataatagtggttttataattggaagcctcttaaggtgtggtgtgatattaaaaaccagataggaaacataggagagagtaaactcaaaacagctattgtttccacttgaaatgcaattagttgtagatgacttttttttaaaagtattttctatgttacttatttcttacaagtggcaattttaagtgctatttccagatatcagccagtcagattaagatgacattgagctattttgtgacgcagacagcttttttttcaatgaagaaatgaaaacatatgacaatttaagaagcatacattgggttgcttatgtatatttttaaattgctggtattattttaaatatacataattgcttatgtatattttaaaatttctttatggaggctgtcttggtctctgttccctgcctttggatccccttcccagctacttggactgcctggttaggcctcggtaggatgcctcaggatggggtggtaccaaatggcagctcctctgaggagaaggggtgggtccaatgggggaagggatttgtaagggtgtgagggtgggaaaagaggagggagggggctgtgatcaggatgtaaagtaaaataaaaaatacaaattaaaaaacaagaagcgccgggcgtggtggcgcacgcctttaatcccagcactcaggaggcagaggcaggaggatttctgagttcaaggccagcctggtctacaaagtgagttccaggactgccagggctacagagaaaccctgtctcaaaaaaccaaaaaaaacaaaaaaaacacaaaaaacaaaaaacaagaagcaaatatggatagagtagaacattctggcagataacatgttattgattattcaaaaaaactaatagaattttcaaatggtgtgaacacagaaaaatactatattggtctaagtctgagttaccagattccttgcttagattatttttctttgtataaatttattaaagaccctatcctggacctaaaatatatacaatttctatgtgccaattaactatctgcgtatgtgtatatactggatacatagtaatgtattatagtttaataaaaagagaacctgcatacactagcaatatcttgctgaaaggaccctgatatagctgtctcttgtgagactaggccggggcctagcaaacacagaagtggatgctcacagttagctattggatgggtcacagggcccccaatggaggagctagagaaagtacccaagaagctaaagggatctacaaccctataggtggaacaacattatgaactaaccagtaccctggagctcatgtctctagctgcatatgtatcaaaagatggcctagtcggccatcactggaaagagaggcccattggacgtgcaaactttatatgccccagtacaggggaatgccagggccaaaaagtgggagtgggtgggtgggggcgtggggggggagggtatgggtgacttttgggatagcattggaaatgtaaacgaggaaaatacctaataaaaaatatttaaaaaatataacctggaaataagtctcaatggtgtctgcttttaatacatgaagtcctgaattcagttcccatagccacattgaaaagaaagaaaagtgtctgcatgaagtgaccttgaagtgaccttttagacagcaggtgtcaggcacagtgagggcttcattgttcacaattaggtcattattctctataacaagtccatatctactttctttggccatatataagtggtagcaccacttgcctatcagctactatacaagaaacaagtatcatcttagcaggttaaatccaaactgttcttgctgggtgaatatgccccagaaagtgggtactcactgggattatggacttcactggctgacaagccctgtgccctgagcacttgaaaggcagtcggattatatttattaaatcctatcaaagaccttcagtctgaaatcttaaaagagcaatagactttcagacccaattttttttttcagagtagcatattttaaaggacttttcttttaatgactaataaaaataaagcttctattttccaggtagggcaaagtgaggtagcttcgtggtctctataaatattattttgaggctcccagtggttttctaagagaacagaaaagtcttttatgaaattaatcaaatatccaaacctgctttgaagaagagtcccactgtacagttcacctcataaaaacaaaatctttgtttttgtggtctcatggactttaagccaatgccactaagcatggtggcactaatattcttggcccaaagaatattaggaagtggtatctgttaaagacagatgaaattagttatttaaaaagggcaaactttatcaaatacagttctccagtgtctttgcatctaactcattcaaatatatgtttgcaaatgccagtcctttgtcccattttttttcaggcttttgattttttcatatttaatttttttttttggctccatgcttgcatcccagaatctttttaaatttggttgctgacattttggcaatgtgatggttaatctccgttgttaaagtgactggatttagaatccccatggaaacgtacctctgctcatatctaggaggggtgattccagccccttggtttaactgagaaggaagatccaccttgaatgtcaatgacaccatcccatgggctggtctcagactgaaaaaaagatagaaaggaaagaaagaaagagccagctgagctccattcaggactttgcctcctgactatgctcacaaaaagaaaagccacctctcactcctatctccatgccttcccagggtgtatcctttcttaaataataagctaaaataaaacatttcttttcttaaattgctttgtcaggtatttggttacagcaatgaggaaggtaggatagtgggatgcaggatctaaagtgagtttgttgccatagcgtctgctaagatgtgtatatgtctgatgcaggtaatagagatagaaggagctttcacatttctcaggagaacactgactattttaatgttacatgtgtaggcagccaccctgctcgctcttacctatgttcccacacccaagtcatgcaggagcagagatccatatttagttgatagctgatattatgaaaactttagcctgtcaaaggttcgtaaacctttttttttctcaatgtggtatgttatgaagacaaatgaagattagaaagcattttcctaaataaactgataagcacagtttataatgttgaattattattttcctgtgtatggcctaccatgtgtatgtgcctctgctttggactgggagctcaatgtagatatggtttctgttctcagggacttacatggacttgtgtggaaaatgaacctagattcttaaatggccatgaattaaatatctgtatctggcaagagaatagatatgacttttgcagtgcgacaagcaaaatgctaagagaactcaaatcaaaaatccactagaaactaaagaatgcttttcttaccaaaggaaaacagcatatatataaaatacaaagtatcttgactaattgacctagaaatctggtcataccaaatgaaaatgcttctgtatttatataattttatttctaaaaggggaaacttagcttcatgccttttctccctgcctcctcccactaatttcttggagtgtgaaaaatgagttcgtaaccttttcatactatctgtcttgtagtccgatctggtgttgatccagtaggtggtgaaaattctaactgcctcccaacatcaggtagactgaagccatggaggcggcagcgggcgggtgtgggcactggtcagccacagggtacatagtgtgctgccatccacaggaggttatagaatgttctcattttttgtaagtgttgacttgagagttggcttttcaacagaggcatgctctctctatagcaatgtgtggataatctgacaggatgccctattcattctacactggagctttcctaattgagtcattctgaggctcttatggcttcttgtattaaattttcaatctgttgatgaagtgttttatctttggagtctgatagcatcttggaatcacacctgtatttgggaagacaaataccaaaaattatccatgtagaatgtaatattaaaatgtcttgcaccttgcaagagaagattccattactatagcatattttattattgtgaaaatacctgctgcccttcctaccctatacttccatgtttagcttctgctgtcagaagacccttccatgtcatcgttgcaaggttcaaatgtggcttgctttgaacagtgaagcatagaagctgaagtgtaatcaatgtctaccacaaccttcagtgagctgagtaggtctttcccagaaactcctaggtattcagtcagactctaaagcgaagagcaaagctccctacatcagggattgtgtaagcaagacatgagcatgtagtggattgaagatagagctgagtatagaatgttcgctagcatgtgtgagactctgagctcaattgccagtacatataaaaaaagaagagagaagctactttattgggaggttggttaccagagcattttctgatgagaacacattagcttcctgtttatgagttattccttaaaaacctactatgaacatgtgtatagacatttttgtatatgtgtatattgcctttatttcttgtacatcagtaccaacagaacttagcatccttaccagtgtttcagttgctaagatcttccagattttacccatgctgatgggtagggagtggtattccagtatgctatttacttacccttaatgactcatgatgttaaggatcttccatagttcttatttgctatttctctttagtaaaatgttggtccaaatcttcctccaattttggcatggcagtttgtgttagtgaccttggggtttacagtctgtgctgcaaataaggcctgacaaccctcccccaataagtgcattaaaggcgtcaaatgaagagtagaaagcagaaaagatatttattcaagatggccacattatccagagaatcacccaagatgaagtcttgaaatgagatcacagtttaagaagaggaccaaggacatgcctatctaagctcaaggtctgggcctacccactgtgtatccatccttgcctggactgacactgaagccacgatgctggaattgtaaaatctttttcaagaagataaactaaccctctgcctggtcctgccttcatcttctgggatgagactcctggagaaaatagcacattttgaggtccattgtttgaatagtctgaaagatagaacccaagtgtctctttagggcagcctcatctccgctactttctttcttattctctttgctcatatataaagtcagttatgagtcattcctgatgcttgtatgtgacgcaagtttgagtcatttctgagatgtatgttctgcttatgttctgggagagtttcttccaaggccatactgggtttgcttatggcattgcctctcaaagagtctagttatcaatttcttcttttatatattgtgctctcattgttgtatattgaaagcctttacctaactcaaagattttatcttcctttcaaaagtaatttgtgctttaatttgacttaagtgtggggatctattattgatgttagtatttgtgtgtggcgtgaggtgttgtgtagcatttggaagttcttggtaaaatatggttatcccatcctttctgagccctttgttaaaactagtttgtgttacaaagttgtccatggtccttagttgaaaatcaattgtctcaaactgtagcaccttctgacctttcatttttctgttccattcatttgtctttctttctgcctgtgctacactaccttaatgatcatgattttatacaaatcattaaaatcagataatttaggtctttcttacacatttattttctttttcagagttagattggatttagattcttccatttacataaaacttttagaatcagtcatcaacttctaccaaaataattgtgattgtgattgcagtaagtacatagatgaatttgaagaatacgtctttaaaatgttggatcacctcaaaccttgacataataaacctattaatttggcttttcttcctcctccctctgccttcctcctccttccctaccctctccccctttttcccaactccctctccccctcttcctccccttctttccccctccctttcctcttcccttgttctggtctctttcttttggtgctggagtaaaacttgagaccccctgcatgttaagtaaatgccataccattaacacaatgatagccacaactttgacatttctttcaggattgtattgtagtttacagtttaaaactcttactctaatagactctatctgttcctgagtaggacatcttctatgttactcgaacccagatatgagagccacaggccagccccaacacttctatattattgtttctttaatttctaatataaattattgttgtcactgtatagaaataaagttgatttttgtacattgttcttgggtcagaccatttttctaggcccacttattagatatgatggctttttacagatggtgttatgtttctccaagattatcatgctattctctgttgaatctacatggatagactggtgctcagctgtgctcagcagtactgacataaatgaaacatttggctgattcacagttatttagtttttatcattatgtaataaatatatgatataataatgtagaatgatatataatacaggatatgacatacatgtaaaacagcacaatagctatacatgtcatagctatttgaggatatttctatttttcttttagctatcattacataaatatgttagatttttattaaatgtacctttctaaatccactgacatgatcatattttttgcattttgtttgttactgtgagttttgttcattaattcttagatgatacagtaacttttacatgctgggtactaagtcctcttctagttactccgtgttactgttgccatgtgatagtggatttgggttgctcctttttttccaatgtattatctatgttgaaggttttagagcttttattcttcttgtcattctgtgtggtttgagttttagagatgcacaaattgagtggatgctgctgcttttgtacagttcatcagagaattctgttagcattgtttcttctttgagtgttgggttgaattcatcatgaggcagtctgagatagagcattgggttttttttctttttgattttgtttttgttttgtatgtaccaacataaattcgttaatagagagaactgtttaggtttatcagttctccttaagtaggttttggggagggagttcatgttctttaaagaaatttgttcattagtctttccatattttggttgttcatcctatttcaaattcttgtgagttttctatcatatggttagagtggtttgttagtattatctcttagtttagttttttttttttcatagttcttgtacttgggattcactgagctcttcaaaactaaggatttatgcttcttatcaaattcgagatgtttcagtattatttctcagatatttgtaccttttctccatgttcaggggcttcccattggacttggttagtggaagaagttggcttgttctgacatgtggtcttctcagcttagcttgttcactcccatatgtgatctgatcagcattggtaaaagagctctgtacccatctgtgaagtactgtcttttccagtactttcttgtgaactcacccagtctcagtgttcctgggttgttgatagcacctctctaacactaggacaccctgggacacatttcatggctatccttgaacaatggactgcttgctgtcccaagagaatgagtcggttcctatcaggtacttctgttgacttcaccagagagtcactgtcctgtgttgacagaaacaatttctgtaaaatgttctctcactatgagacatacatgctccatggcgtgtccaagacccatactcaaatactcacaaataaaatggaacaaaatattttcaatggttttgtttttgagttgcggtttgaaaatgggggagtactctagaaggttccctttactccctttggactggaaattcaaattattaagttgacgttgactacacattcttcactcacagtgtggattgggtgagagaagctgactggaattgttttgtgtgtcagcttcctctttcagtagcaaacctgctcattttcagtgaatgcttacttttgtcaatcattttttttcctcagccagttcttctcagcttgataatgaaaaagcaagcaagttcatttcctttctgttgactttcctagcgttccagccttaaggcttttgaagtagtcctgatttgcacggagcttgtttggctgtgtgagtcatgccttttatgcagtttgcattggcagctacatctcccaaatggaattcttgcaataaactgttcaaataggtcttttgtaagtttgcataaaagaatgttttatggaaatatttgacacaattgtgtttcagaattgggtagtttctatatatatatataaaaaggaacatgatataaagttaaacaatgtaagcaggaaatgcttgtttttgttgattccacttcctcctacaccattcatgatgaagagtgatgcagcaggttacagttttagactgaagaagtaaagggaaatgatgaatatcccttggcccacaagagaacgcagacagaagccaggacctaaaaatatctgtcttagaatgtatgatatgattaaagctaaacagaggtagatttttctcacctcgatatagatttgagtgtgaaaatttgctgccttaatttctgtaaagaaaaagttactatttgtaacgccaacatattgattgtattacagtgaggcataattgatcttattagtttgtgataatatatagttttaataataaaattacacagacaatgtgaaacatgtgttttacttctgttaattttctccagctcttgaattgctttcagtggtgtcagagcagcagcaatgccattcttctcaaaaggacagaagttcatgttgcagggggaagcatcaacctcggtgcctcataggccattcacttagagagtggcagctctgacaagctctgagggagccttgggggccctctgattcagatggctacctgatgaacatctggacaggtgcccgagggcctatggttttaaccgatttgagagacacaaaagcagctctaagtttctgagaaacaatttgagcaacgctaacaccacagccttagcagggttgctgactgcaagttggttttagaagcaagtattaaaaaaaaaaaaaaaaaaggtgagactggagttaatgaagactctaaggctcctcctcttctttcccttctgtctgtccttcttgtagtgtggtagctctaccttgggtgtttgaggacatctcataagcttcgcattctgacttccatttgggaaaggactggtgtgttcattaactccgggtctacccttattacctgtgctggccttcatacttagacttcctgtttctaggcctcttatccaccttcttcctcaaggtctcccttctctacctctttctggtttgaatgtcttctgcatttgttagtctctgccttacgtttacacatcttccgagctcagggaaagagtcatctccacacacagcgtctgtgagcactctattgcaacttctgtagatccttctcccacattcaccaggcttgctttgttcaaaacgtttatcacacaaagatagtatctttcagtttgtcacgctttcttcccttttcttaaagggatagagtcagtaacagaggggactatgtcatgtttttgtctttaacttccagtgtgcggcattattgcttcacacaatacatagtcaacgagaccctgagaaagctaaatgaaagacttgttattcagagggtggcaaaagtatatcccagatctaaagtattcaaggaaaacttattctctgagaatgcggggtgatctatttctattttcccttgaaatgacaacagtgagcagtgttctcatctcctacgcctggaactcttaagaaagatagagccatccaggcaaactagtaatagtcaacaggccactgtggaggcagatttcatctgcagatattttttggcaagaggtatgctaagagcattttctcaccccttttatttatttatttgttttcctgcttgcttagttgtttttcttgtgctcgagacagaactcagagcttcaggcatggttagtgtacgttctaccacagagctacagtcccagccctcaggacagtattaatcatcaccttctattggcataattagaaatccagccagggagagactgtgatagtacacagtatacacatagcaagttgtctgtatgcacacacacacacacacacacacacacacacacacacgtgtgtgtgtgtgtgtgcacatacacacatgcacaatctaatcttttgtgcagtagtgtatctagtaccttacctatatatacttgggaaatgtcatgtttgcctttataatattgctgaaggttacctatgaggcagtatgctcattttgcaagtagaaaactgacctagaaagacagggacacaaataaataaaagctagttgatcttgggtctgtatgctgagtctgaggtattgactgactgatgatattagatgttggcatacagtcttaaatgcctcctgtaataacatcaaatgccacgtatataatatatatgtgactaaggaagctaaaaatataactgtatcataaacatgctaatgaatttaattgcttaggaatgaaatgaaaatacaacatttttgcttaggctcatgaattttatgaacagaaacacattaaaacttaaaataaaaaataaatttgcattttatttgtgttttaactgcagcccatacacgccaacagcaaaacgtttaaaatgttaaaagtcattaaatgcattgttgagcatttgaaatatctgtttgatatttgttattgaactataaaatgatatatgagaatctcagtaaatacagtctgtctaaaattaattttggaaagtaattcaaaagataatgctttgcttacagttctgccagcaattattaaatatgttttgaggagaaaattgctatctaatttacccatctctcttttgtcattttatacaaaacaagataaatattctttagtttgtgaaggctgttgacaccagttacaagccaattaattatagatgagttacccatgcatttgatcataaaataaattggatgtggctgctggaccaaagctttagattattttatgcagatcaaagcacattttgagtaaccaatggttgctgggatcatccattcggatgacagaaaacaaaacaagtacccagtaagtttatgagatatttttgttggtaaaggtacaaaatatgttttgaataaataagccaagtatagaaaaatatttgaactcattatattttcagttcacttaatgaatagccatttgaggagctcattagcaacagaaatttagccttgcttattaaagggagtgttatttttaatcgctgcattaatttgctaacctagtagataatctttattcacaagtacccaagtttctcacctcttttagtatataatataataatgactttgcaacgatcttttggttttttggtcactcacagtttatcttttaggacactaataaagctaagaaaacaatcagttccagtcatcaactaaacagccaagggttgatatttgcatttgtttgtgtttaactttagaatggcgtgtaaaatcttagattcatttgctgacctcactagtcttcactgaacccctaagagcttagaatccagagataaaataaagctgtcaaagatctgtcttcttagagagactccagttccaagaaataaggagattatagaaaactttctggccagtaatcagggacatgtggcatatagtggcgactcacctttgtataagggggaggggggaggtgcttgctttgctccaatatttcgtgacctgagacaaacttcagtttaggttcccattcagcctgttgcaatctgagttctgcatttgggagccgttctgctgatgggtaatcaggctaagctgtcatcttccacatcagctggatgctggctgcgcaggaactctgctgaggtggtgtctctttcagcctagctcaccttctggaacattagcccacacttctatattgcagcacggacagagttcaagagtaaagcaggattgttgggaaagccaacattctagcctctcttccattcttctgagtacatactatataccaaaccactccttggctcacttgccaagagccacagatgaacaaactttgccctgtaaatagagtggcatggctgagcttgcagagtatacctgcatgcattcaagatgcatactatctcactttgaactactttacatttttcatttggaaaataactattttgttatgggttctccattgggcagagattacaaagctggtatatttaggacacattgaaagtaagagtgaaaaatatttcctgaaaaattcaaggttttttcacattttctacttgtttttttttttttttaatttcttacagtgaagtgcttttacacatatatacctgaattgttgaacactagtacagaagttaacatgaggggctcttttacaaccatatgcttattttgtcagcaagaagccagaaacatacacaaactcagtgttgtatatttatattaggtactcagtgaagaaacagcagagatgccatgtgtagagactcctgtgtgtactctgcccatagtagatagggcattttggttgtaatttaaattccaattgacttgaagttttgtattcagaaacctctctcatagcagttttacactcccaagttcatttcttcacctatgtccttggtcattctcccctgtctcaggtgtcagccaggcatggaaactgtgctatattcatagacgaatcttccccaggggcccagcagagcacccaagagcatgccctaggcgagcaagctcaatgtgtactgattgaaatgaaatacaagttatatcccctggtttagaagcaaggactcaggacagcaggttatatctaagcagtccctactatggtgtctcttggaggttcttgaatgtgttccatctcctgagactcctgcacagaagcctttatctatttgatgcatgagatactgtgcacctttggaccacaagccctggtccctctggggtgaccagttggatagggaaaatgtcaatctatgataaatgtcatggaatgagatggaggaagcgtccagtcctcaccattatacatatccactgtgcagtgcaaatcctcggttagtgccagtggctcgtattagttctaaaatcttaacatgcatttataatcaggttataagaagtcatatacagtgagttttcatgtttgttaaaagatatatgcaataattatatttaagtataggtgttactttattaaaatatttatcaatgtatatatttatgagataagtgtattaaatagagattttattatacataaattattattgcttatattattcccatgccttatttctctaagattgatacttcttagaaccataatttcaaaacacaaaagatcagctaaaacttatggtctataggtttacttcaaatgcttgcttacatacctttatattgctaaggttatttgccatttgcatgtcacgcttcataatcacaagtaaatcattttttatttttaaatatgccagtacatgaagttaaaactaaaattaataacattctatgcactggctctaaagatagcaaggctattaaaatacatatttctaagacatcccagagaggagataattgatgggaaccactctgacatggaactttctctctcgtcaacactgtcactgttcctgataaaggtggcattgtaagagatacatttccccaacattaatttttaaaatatctttcagttgatgaggcagatggacaggcttatacttggaaatcatttattgtatttgtagagatgtctgtatatttgttttgtgtcatcaaatctatatttttggggggcacatgactcatggttaattatagttaactatagttcttttctctgaagtgcacccacaatggaacagttgagaacaatggagttctcgataaggaaatgttagagtttttggattggggaattggtaattacttaatggttctcagtggtccccaaactactgctcttcaacactcattggaaatattttgttccttttcatgattctaaaaaagtttgctggtataatagttgcaaaaaacccaaagcccagataatttttaaaaagaatttcaagagagagataaacttgccaaaacaacaactgactattattttatttctgagttatgtttcctccctttgtcttctggagtcacagagaatccccaaacctgggtcagatcaaaaccctttcgctgctccgttccggccagttcgcatcctccatctgtcatggccttgaagaagggacggaggcagcttgcggtccttccaatgcagttatgtgttgtgatggtgggcactttagctctgatatctagagaggcataagcaataagacccactttagagactgatgtgccgatcgtagtgactacttgggaagtggacaacagggctcagaatggtaagaagcaggatctcacgtgaccagtctgattgcttccttccacatagctccctacgtgtagagtctaacctagtcagagtggcatttgcctcccttacactgactggtctctatttgggcctggctacttcttctggtgtttagtgactgcatggtcttgggtttcatttgaatgcctgttctctttccagccagttcaacataatgccctccttgcctgttccctccaactttatacttaggtatatctactgtctagtatgtgaatgatccccagttccaccgagtcatcatccacaagtcaccagcttagtctttttccttaccattgaacaaaccctgtgtggttgcatgtacactttttaataagtttgtagagaacggaagttcatttattttatagctcataaacttgtagctgaattctactgtttatttttcccctttacttgacaaaccctagtgacttagattattaacaaatgtttatggatagccttgtttacagagaacatttagaagtttgacattttttaatgttgttttgcaaagatgtgtatttggatcttatgttgtaccgtggttttgtgtgtgtgtgtgcatttttgacttgtctggtttttggtttttgagataagacttcactgggtagcatagcaggctagtatctattttactatctctctgtctagactcttgagcactgagattaaaagcttccaccaccacaattggctagtatttggactttctgtacatacatctaaatagtaggaattgtgaattcagacccgggcagatacgatcaaggacacaagtgacacatttcattatatgctttcttctctcctccctttgaattttgaatcctgagaatattatttctcatttaagtacaaaataatttgaacacttgatataaagatgtgtggttctagaaaagttgaatgcaaagctttcattcacccatctaatgcctaaaatactcgactggtggtttacaatggaaaaaaagaaagtgtggctggtgttgacacttcttctgcttgtcatcagcagtgactcagtgtggcatgtttggagtctctcgggttgaagcaaagatgttgggagagtcaagggttatatagattctacttgaaatgtgcttttgttagatgagtttcacagtattttaaatatatatatatgaatttctcaatctagctaccgtttcatctcaggttggcagggggcttgtcctgtgtctcttccatctgacactcaatcatggtacagtctcactggtatactgtgaattctagttcaaaaggaaaagagcaagtgacatatcatacccaggctctaaaagtgtttgcacagacacaccataggtcccttcagctgacatgtgcttggtcaaatcaaacacatggccacacccaacttctaagtggagatgtacagtgcttccacgccactagaaatgccaaaagaaacagtatatcagtgggctatttacgtagcatgcatgatgtaacgggttcaatgctaaacatctaacaacatgagcagtagcagcattttcttaaaattccaagttgagaatgtaatcacttttcgttgtgttaatagttggacaataagagctttgggttacatgtaaaattcactctgttaacaacaatgaacatggcttaaatccatagacacctctttgttttcttctcacctgaacctgaaatctaatctaagtcaccagaaaacaaaacggaaacaaacattaaaacacaaaaacagcctcatgctgtctgaaatatctgattccaaaaaaaaaaaaaaaaaaaaaaaaaaaaagaaatgaatgttgccactaagttgtctaaaatctgcaggcattgacagaggggcagctgtgttctcttgtgcttgcctcctgacaaggaagttggaaagttcttgctgtgataaagaagccatgtgccttttcttatgaaagcccacacaaagacatgccccgtgctgccaacactggttctagtgggaccattcccattctttcactctgttccccccttctctggttgtacgcggggccggccctcttgagacagaggaacttgctccatctcaacctactgtgactaatgggggaagcatgggctgggaaggagggagtggataatggatattggttttcattatcctgccagagacacttgaatcaatgcagttggcaattggtgaataaagaagtaattgagggtttatgtcgtcctccccataggggaaagggaaagtcagagaacagagacacgcaggctgctaccagccattttgaaatttatgtttaaaagaaatctctgaagttacaaattacatattacttctgtacatccaagggatgtttcatttactatatcctatttactgaactaaggacaggttttttttttggggggggggtattgtttagtgactcaataatatcatttcttctccacgaaactcctagaaattttagcatttagaagatgagggaaaatacagttggctcagctgaggtgcagcctcttggagctagtaattatgtcccatctgtttggagaaataagttggcttttaagagagtaaatggggtaacaatttaattaaaggcaggttagattacatgcaaattacttgctattattattggagggatctgtcaaaatggacaactgggaaagctgttttccatgtttcttgggggaattgcttacaccatagctggggaatgtaacgtgggcttttggctttgttttagctctggtgtgtggaatgaaaatattgcccagagtctctgtgtggcacctgctctctttatcctttcttggccttggtcattatagcctagtctagcaccacactggaaccagcacagttttagctgatatgggcttctgtcatttggcttacaaatgttttagaaacaatcacttagtatttaaaaaatattaacaatttaatcagtatccaatctgtaatttcaacctagtattttctctgtggacttgaacccactacaactgagctcccttgtctaattataaatgctacaaacataatgatatctgcagttgtaggttttacaagaaatacattctttcgcactgtcccctggtcaccccctctcacaaacctccttctccagcctcctcttatcctcggagagggtgagagccccactggatatccctccaactctgtcacatcaagtctctgggtctaggctcttcctctctcactgaggccaggctagacagttggctagaagaacatattccatggacaattgacagatttgggatagcactgctctggttgtttgtgacccacatgaagactaagctgcacatctgctctacatgtgtgtagaggcctagatccagcctgtgtatgctctttggttggtagttcagtctctgagagacccaagatttgttgactttgttggtcttcctatggagtccccatccctttcaatgccaacagttcttctccctacttttccataagagttcccaagctccatccatttggctgtgtgtgggtgtatccacctgaggtaggtgctgggtggaacttttcaaaggatagtcatgctagactattgtgtgcacacataaccaagtaccattaatagtgtcagggattggtgcttgcccattggatgactctcaaatttggtcagttattggttggccaatccctccatcactactccttcccccatccctgaatttcttgtagacagaatatatttggggtggaaagttttgtgggtgagttggtgtccctatgactctattcctgctggctacaggaggtggcctcttcaggttccatatcccctatgctcaagtgatagcacatgctggtgaggatgtgagtcaaaaggatcacccctccatccaaaaggagtgcaaacttggatttctcaaatagttctaggcatagttctaccactagacccagctataccactcctgggcatatacccaaaagatgctccaacattgcaaagatacttgctcaactatattcatagcagcagctttactcataattgccagaaactggaaatatgttagatgttccttaactgaagaatggataaagaaaatgtgttacatctccaaatggaatactattcagcaattaaaaacaaagatgtcataaattttggaggcaaatggatgcaacttgagaatatcatcctgagtgaggtaaccccatcccaaaagaacatgcataatatgcgctcaattatcagtgaatcttagccgccaaatacaggatactcatgctatatcccatgaactaaaagaagctaaacaagaaagaaggcaaagtgaggatgcttggatcacacttggaaggcagaataaaatagtcataggagggggatggagagagggaactagataggagaggaggtgaggagcaggatggaggaggttcaggatcagatgtggggaaggacaggaaagatggccagatggccatgagaatgagtggacatctgcaactgaccatggtggagaggtggggggcatcttcacggcatgacagagacctgggataaaggaaacatccaagaatcaatgcattctttcttaataggaaattatctgcatcagtcgtttgatggtgtatctgacactgcttttaataattttgcatttgaatgactctaaagattttcatataccagaatacatctcataaaaactcacgagtttaatgaaattgcagttgcggatacactttaaaagataccaagtctactataatgactttctataggttgagtggttgtgtgtaggggttgactgacacaaatgcaaagtataagaaataaatcaatcaactcaatcacatctaagctagaactactttctggaaggccagactgctcataaaacagcttatactatacttggtagaatttcacaggaattctactgtataatttatcatttccccagtattttcccctcccacttcccccatttccccagtattttatgtttaacagaatatcagtattcaaatttatttctatatcttaaagattcaccaaacagtaacccatagaaatgagtgagtacatgcatttgcatggatgaatataagttaatatgcactccattaatacagcaacaaaatattatctccagtatctgtttacagatacttgtctgtgaagttttcattgtttcagtacatttgcttttttttttatacacaggatcctccatgccatgagtcaaaagtcatttttcaagtcataaaaacaagttttttttttttcctggagcctgacttgtctaaaactaaggtgctaatcacctcattttgaggtggaatgtctctctgtttcctcacacaatagaatggcattttaatttttattatgttttcttttctgtatgagtatgtgtgctttgtatatgtactatgtatatgcatatacttgtacaggtacaaccacaaatgtgtggatgccagaggaaggcatcatgtgtccttctttttcacttcctgccttactcctttgaggcagtctgtaactgaacacagagctatgctgtgggtgagcaatgactccccctagccctcagtccatgtcatctctgccccacacagtactgaggttataaatgagaaggttacctgggatttttagataggtatgggacctttaacctcagattctcatgcttgcataggcactatcaactgctgagacatcttcatggtccttaatttttgaaatacctttaaaagacttattgcataggtctgtcaacacagtaaaatgaaattaaagatttttactctcacaagtctcctgatttttatataatttactagaccacaccagtcatattggatataaatttattgcttttagtaaattggaggtccccagatgactgtcagagtctgagacatagtaattgcccaagatcaaaaccatgcagtaagttgtaaacccttcatttgtgttttataaaggaaaggattggagacattggtgtcaggaaactggataaagtttatttaataactgaaaaaaagttaaggataaattatttgaaaataaatatgttaataagctatatttataatacaataagaatacaataaggtttcattatcaaatattctttactgcacattataattttatgtcaccctttctaatcatgctaggatgcttcaagttttttttttcatacttctgaaattttcctacccaaaatataattttataacctctaatatctgccaccctctctactggggtaaagtctatgttattttaatacttagtttcacaaaaggaaataattgcattatcccagaacctttttgacaactagatttggtattattccagaccattttatagtcattgtattagtttcgtttatccatttcattagttatagaattaatgaatgcatgactctttacatgacttacagacagatcacatggttatgtacttgtattcaaaccctcttttcaatattcttatcaaccagtgggctagtaaaaagctatgaatatcttgggtatcctaggttttgggctaatatccacttatcagtgaggacatattatgtgagttcctttgtgaatgtgttacctcactcaggatgatgccctccaggtccatccatttggctaggaatttcataaattcattctttttaatagctgagtagtactccattgtgtagatgtaccacattttctgtatccattcctctgttgaggggcatctgggttctttccagcttctggctattataaataaggctgctatgaacatcgtggagcatgtgtccttcttaccagttggggcatcttctggatatatgcccaggagaggtattgctggatcctccggtagtactatgtccaatttcctgaggaaccgccagactgatttccagagtggttgtacaagcctgcaatcccaccaacaatggaggagtgttcctctttctccacatccacgccagcatctgctgtcacctgaatttttgatcttagccattctgactggtgtgagtgggtgggtaggggattgggggtgggtgggtatgggggacttttggtatagcattggaaatgtaaatgagctaaatacctaataaaaaatggaaaaaaaaaagctatgaataataacaagctagttttgagggaattacaaacaaaagaatattaagacaagtctagatctcaactgacatacaagtatttcatgtacaagctaaagaaaaaaaaaagaggcttttggaacaaaaagtattatctcctgaagttcaagttcatgctgtttcgccgattcagcaaatatgcaaacctaactgccaggctgagtaacagactcggagtcacccaagttctagtcctctgctcttgctgttttctcacttgcttctctgatttctcagctgctgtttaaactttaattagggtaatgtcagaattggagggtgggcatatgttccttgaccaagatgagaacattcaaatcaaaccctttcttatttgttggagaggtaagcatatgttcgagactgtatgaaaaggctgcatgttggggctcaacagtgtaaatagtagcttagaaaagaatgtttgtgtagatctggtggctactttaatacataaataagcaaagaacgaaacaatgtagtatcaatttaagtatatgtaaatctaaattttatatttgtgcgtgagtgtgtgtgtatgtgacgaaaagcttaacgggaagtaaaatcaggaagatatttggtgtatatggagggaaatagtactacagatttatgaagaagtgccagggaaaagtgatagccagccccaaccaaattttattcctaattaacagcagttctctctgattctgtatccttcacccctactctgtgaaggccactgtggaacacagcattagcctgaatcagcttatttttttaatgcactattttttaatggttatcttttaaatctgtcatcactttccttgaatgccttgtgttttttgaggtgctagcagtgctccatggaatcctgactgttatctaatcacatttttaattttttggtgtgtcaccaagagaaatcaccccaaatctactgcctgcaactcaatagacagtaaaaatggcaacctgcttcatgtgcttccagaacatattccacgtcatagagaagtggagcagcagtcccttccaaaagacctggaaatgaaagcatcattttgagctgaaacaggaaaggttattgaacatcttttccatgtgctttggaaatatatgcaaatgtacatgaaatactcctaaatgaaaccctgtcaacctggggtagactgcaaaggcaggagatggctaccatttagtttgtgttctgacagaaagctagttacagttattcatcaaactgtgttctgcttggtgcttgcagtaaagactcagtgtggctggagtgaatccagggatgctttcgtgtttaaacgataacaccttctgaaagcactggcacgctgaaagccattaacatgagagaccagatgaaagtcttatttggtcagtcttgaggcgattgatgtgactatgagcttccttcttcagacttggagagatgaccatccattttagaaatgcttgtgcatggtactgcccagtaggacatttaagactgaggtgaattcaaggaaatgtcacacaccatctgctttgttgtggcatgtttggcttgcctttctttttcgtagctacctcacaggaaatacgcttaccatcacattcgacaaaaaagtgtaattcataaccaatggtagagattgtataatgtcttgactgagtaactatgaaaaggtttactttaatttaatctatagataagagaccagttacttatattcactatggctatatacccagcagatgtaatttatgagaagttatctgggctcagtttagaagttacagtccatcatggcaggggatggggtggagttagggtgggggcagctctgttcatggtggtcagaaatcacagtttggcttcttagagagtttacaatggaatctgaagacatcaccctcatggccagctcccagcaatccatgtcccttagacaagcccacagagcccataacctctcagaacagcaccacatgctgggaccagcattcaaacgcatgagcctgggattgaggtggtttttattcaaatcattacatatcctgtggtgttctatgcctgtataaacagcatattgtctgctctgtcaatggagaaaagatcgctgagccttccactcaagagtgtatgtgtggcatattgttaacttcatcaaatgctatcaggtctggggacagattgctttccccttctgtcatgaagctgaagtcagtcatttagacaaacagtgacaaactattttgtctatgctttgttgggaaataacactgaccttttttaagcctaattttaaaagtttctactctcttaacattttctcagaattaattttgtgaatatcctaaagaagtggttggattgcttctccagcacacaaagttttggtgatcatttttgttttgtttcctgtagtttctgggctgcttgtttgtctgtttaaatggtggagacggaacccagaacctcaggcttcctaagtaggcattacccatgtcccttagacaagctacagtccacataccactgagccacatcttcagaccgatgagcaaaactctagccatgtatgtccctgaacttctgcagatagattcactactatttctaagttagtatttgatttttaactgacgaataattgtgtgtgtgtgtgtgtgtgtgtgtgtgtgtggtgtaatttctttattcatttgtctatcaatacatagctcgtttgattctgctcattcactgttgtagatagagctgccatgaacttgggaagctgcgctgtctccccagtgtatcgatttcacttcttttgcgtctcttctgagaggtgggaggtgatcattccctcttccatcttgtaaagcactttcctgcacttttctataaactatatccaaatttaagttcctaccaacagcgcacaaagttctctttcctccacacccttgaaaattcttgttatcttttgcctcttttaattatagtttgtgattatttatcatttatgcatgcatgtatgtgtgtgggttcatatgttctacttgtagaggtcagaaaacaatccttggaggctagtccactccctgtactatggagtccatccctggactgcagggacgacatacccagtgatgacgtgtggcagctggtacctccctgttaagccatccctcttcttccatctgtctagtgacaggcatgagagcagctctctcgtagttttaatttgtttccccaaacaactggggacttgcttagggacctgttttcatgactgtgctgatcatttgtatgtcttctgggggaaaaaaggaagaaaggaaaaaggaatagaaggaagggagggagaaaaaggaaggaagaaaggaaggaaggaaggaaagaaggaaagaaggaaggaagagaaaggcagcatacacaagtttgttgcctggttttaggccacattgttctcctgttagagaatttctcgagttccttgtgtattttggataattttcccttttaaagttttaaaatattatcttccactctgtggattgtttcctcagcatagaaatatacagatggcaagctgcctctggacagccctgtgtgtatgtgttgctagggatctctccgtgggcctcatatgtgtcagacaagcatgctgggccagctacattcagccccctaaccatttgctgtggctgcattttgtttctgtcgacagaaactgtgtctattatatataattttttaaaacgaacaaatcagactagcacaatcataatctcaaatacgtgtgtggaaagaacatttcaaatctactatttctgcaatttgggaagagagaatccattaatactaattacgatggctttgctctgcagtgggtcttctgaacacttcctgctgcctgcttgaagcttggtgacctttggccctctgcttcttgccagccatccctcctgctaacctttagaaaccatccgtgtactcagttcctatgagtttgaggtttagattcaacatatatgtgcaatcatacactatttgtcttactaaacccatttcccacttattataatggtgtcaccgttgagcttagcttaaatagaagtcttcaatttataaatgtacagcttaaaagaacttgcgtgtcattgttatcgagtgaagttcaagaacaagtgaaattaatgagataggaaaacaagaggacatcctcagtgatgttaagcctgttttatctggatagagatcagatgaggacagagtgtcgagtcttacactcagcagtaaaacctggctatgtttgtattactcgtaaggaatgtagtgcactcacacatacacaggaaaagaaatctatggacacaggtttgctcagcaggtgcagggacttgagtccaattttcagctcaaaaaaaaaaaaaaaaaaaaaaaaaaaccaaaacagtgaaatctatgaagggtcaatggcagacagaatgagcacaattttcttggtcagtcttaatatgacaaatgacatcttcttgcagtgcagagagttttcatactttcagtgctcagcaagagttggaatagatgggacaattcaggatcaagacgtgtacggaaggtgctaaaatgcagaatggtccgttcccactaaagattgcatgattcctgtttcctttctgccagctgctatcatgaactgcctccagaaagacgactgttacacctcaaatcaaccagatgaggacatgaggacggcccccagaatattgccaatggagatgtttgatttataaaacatatcaaaggcttccagagtcaaagaacattttaaaaaaccattaaaaagaaaaaaggtcatcataataaagcagaaagctctgtccctaaacaacaatctgttccaggtagtaaaacattgtctagtatcatggtgtcatttttcccctaaccaagaaaaccataactaaaatataaaaccatattttgtgaattacaatgtatatttcatatattgtatattataaatatacatttttactttgtgcatggataaattcctctatatggaaacccagtgcttctcaaactcttcttccaatcatcctccgatcccgttaagaatgatactcgccttcaggtttggactgagtttccattaaggacccaagttggggtcagcagatcccacttccaaagcaagatacaaagctaagtggtgtttagactctatgttaatgtgttctgaaagagaaaataaaactggaaactgttaaagtctaggtctaaggtattaaggtgaggagaagtagagttcttcataggttcagccctaaaggaagctctgtgtactttcaactgtctccacttatttatgtgtctgttttaaagtgactgtagtaagagcccttcaattagggagctgtttcagcaatagcatctacattatcataccagcagttttattaaactaataactgttagcatggagacaccattactgtagattgcatttctaattatggcactaaatatactcaggttgcatacgagtgttagcaatttctaccctaatggcttacctctctttcctctccttgcagcctccctcccatcacttcagctctgtgaacttctgttactgtgtgtaaggcttctcccttatacagttatccaaactgaggtgtgctagttcattaactacctccatgaatggctcatttgaacttccttgttggtatctattctctgtagctggaattggttcaaagtacatggcctcattcagaaaccacttactatctagttgggcatgtgtcttgaaggagacacagtacaaggaaaaattcatataagccatgtgcatgaacatttggtacataacagacatctggaagttcggcagctcagctgaaaatgcttcctctctgattacatccgctctgggtgcttattagctggacaggctggctcaggcagctctgtgtaaggaatcccctaaaatctcccataaggccatgctttctcctggtgacaacctgagcatacattgcaaaggcacattcagcaatgcctgcctgcttcaaccttctgccacatcaactagcttgattttattggtcaaatgccagtcatagttttagggcagacctctgtactctctggtcctgactagggagaattgagtgccatggccaatcccaacataataacacatagataagtcctctcatggcagtgaaagggtgtggatgaccatttcagaaggacagacatgtctagcaaaaacattttctctgttaaccatagagataatgtctaaagtctgagtcagttattttactgagtgccagatacctatatttagctaaattaggaatgctgagttgttcgtttaggtcaataatcccagggcttggtagaaaatgagaaattatggtcctaatatgctcacagttatgacactttcattgtgatatgacattcttcttgttatatcagtgttttaaagtccagaattcctggtgacttgatccttgggtaccacatactttagtcatattcattcactcatacaaaataccataaaatgtttctatatcgtctttactattatttatttattatttgttcgtatagaaaaatacaacactgtcccaggctttgcgatccttacagggcttacatatgagttaataggacatctaattctaggcggtgagccctatatttctactagctgtatgccagtcttctcagggggagaggacagccactgatctgttgaagggatgctggagctaaatccggatagagaggaaaactatcaaaagcatagaggactggcagcatgctggattcaaagaaccatacataatggtatgaagttgtctgggatcacttaggttagactcttagaccctggggtggggcgcctggagcctacttacaatgaaaaagcaagaaggggtatgctggcacatggaaagatatcaactggagtaagaactaaaaactgtggattgcatttaaaattgaatccgtgccagaatgatgaagtaggcaggttctctgtcagagtcatgccagcctggcaactagagagtatcctatgagcaatgtcaacctcattccagacacaagaccatagacaaaatgagtccaacagcccccagtgtagcagatatggtaacagtagctctgcctgtgttcaagctttgccctttgtttcctaagcacagggcagctacatttcccagccttatttgtagttaaggtttatgtctaaacccttggttattgaacatgaggagaggttgtctaccccatggtaactccaacctaaccattgatacagagacatgaattgcagtatcaagaagggagccgaagtctccactggagtctgaggtcttggatcactttatgatgaaatctacacttctcagctcagattgaacctggtccaggagttaataactttttttggcatggcagtaaattttaatgaacttattttgaacgcaattcatttggttattttacaatacatacttttctgaatccttttacctgttagagtcatacattcttacttaatatgattagtctacactaaatagcaaaaccagaaatatcaaggtggtcagcttcccctagtgttgcacgtttctgtgtaaagacatttcttactcctttctccagaggtccattagggtgtgagattcaagagagggctgtcaaggacatccaggtgcagatggtggctttggagatggaaggtcccagggctttgtctctgctctccactgaggtgtatcagtcatttgcttatccagacatgcctactggacacctactacagtgtgacaggcatccaccctgtgaagtcaccctgtcagtgaagttagcacatcccttgtctttgggtacctattatgtaagacctaaggaggaaagtgcagctgtgtgctcgctacagaaggctgtagctagtgtgtgagttggatcagtgtggagggaagagacctatatggaagactgagccaagccttctgggaaggagagaccttgacctcatacctgaaagaaactggatgagcaagtgagatccaagtaataggaggcaaagtgtccatcctcccccaaggaaggggttgcagcatggctgtgctgtccaagcatccctgcctgccccctgcagcccacacaccaggactcaggtgggaggcaggagttgctccagaggatctgaatatttttgcataattgccctcattttgtttaactgcctactaatttgtttatgagattacataaaagcggtagacacactagtagctaaatacagaactttacgctccccacaaagagccatcaaaatgacatgcaaatgtttctatatttatctcttgctttgccgccaattcttcatatggacgtaatttgtatgtgtgcatatttatgttaataattttatttatagaacactattagacaacttatgacatcatttattaaaccccgaagaatgcttagctttcacatttatttcttgtttttaattattttaatgggttcattgtcagttgtttcctggtagataatgtgtatagatgtagtctttggccagagtgattgccttgtcattagacagcctaaatgagaccagctcatttggctgggttattccatttattgcttatttatttattcacttatgtgtttgaggggctaagtgttgaactttgggcttcacatatgccaggcagatgctcaaacactgagccatctcccaaacttttttcttttctttctttttaaattaaatatttatttattttttattttgagacaagatcttagtaagctgtctagcctgactttgagctccctctatagcccaagctggccttaaacttgaaattcttctgcctccattcctgaagtagctcagattattggctgtgcagcaccaagcctggtttagtttcctcttgaagccaggaaggctgtcgaattcatgttgtagacaaaggggattgctttttttaaagcctagaagtcatagagcaaaactactcagaaatcacacttaggtgacagagtgataagaaaagttccttcaggagccactaccactttacctgtggaaactcttgagtcgagagaggcgaaaagggccttggttcagaccaagactcagagggatagattggaggattttctttcaggataacctagtgttcttttagagttagcattctaattattatcatttcaatgtaaatcagcctctaaaatcactccattcagaaaggttaggaagggatatggaatttggctaaaatcatttaaattacacacaataacattgagttcattattcttcctgttccctctatccagctaggtttgttgttttatttgggttttgttgggggattttgttggttttctgtgccgacttattctctaaaatagggaccaagagctgagtaacagcttacatatcttttcctggaagcactttgttaaggtaaaacctgcctcctgtagtatacaagggtaagtgtatcttccaaaaataaaaaaaaaaaaaaaaaaaaaaaaaaagaactcaggcgaatatacaaaactacttaacggtcatcaagatgtggaatgtcatgctagcctcctctttccatgatccagccaggtacttcacccacaaaggcaattactacacaattcctatgacctaaatcacgtatgcatcttcttgtgcttcctcgccattgaatcatactgcaagtaaccctctgggtcaggattctctcatcagaagtctgtgcactaagtatagcctgaggtttctgcaaatattgcatgtatgtacgatttcatgtgcctaaacattgataaaataaaagcagcactcactaacaggaacgtttgtaatggcaacaaggtgtaatgtcaccaggaggggaccgtgttaaatcagctgtacagaaaattcagaaaactatcctaggacaaattaaaaatagaagtaacattgcaaagcacgggaagatgtgtataaccttcttataaatatgcccatcttaagcacttttcaagtacggaaagaaaagcctaattataaattattcttatccatttattaaggctgctccctgaagggctaattctaggtgatgcctcattaaccttgtatcagctacttgttctttaattttttaaaaaaaatgattttcccataattttcattaattcagtcaggccctactcatttgtacaaattagtaaggtgaaagggagagtgagaaagagagagagagagagagagagagagagttagttctgtgggttgagggttctaggcatttccccttacattcgctagctctgttctttgcatgaattgccatctatggagcccccagcacccagtggatttctagttcaaacgcattggtatttaagcatgagctacactgtgaaaggtcacctctaattctattactgtattagtgagcacagatactgaaccaaatgttacctagttttatagaacagttcatatgagcccattgcatgtgttatatgttacatttcgctacattttacaagctagcaatcataaggggcacttttttattatgaaactaatagtaatttggggaaaaaatccttctgtccattttaggatatagcatcctagcttttgagatggtaaagtctggaaaagtgtacccatgtgaaggaaatacagaaattgtaggtaccagcaatgtagtaaagaacagatcactgtaaaggaagatacaaggattcaaataattgagatagtcactcaaagttgtttgcataactaggggtggtgtgggaatgcctaaaggctcaacggttttgtacaagtactaacaaatgaacacaaagtccttaaggagaagctgatgccctgcagaaaccagagttggggaatatggcttacctcatctttttttcttaccacagctcctctttcttgtagcagatgaggtgtccctgcctagccccaccaacttctgtggaagcagacatggtgctgacacggtggtcttggcttctggagattgtatcactttctcctgttacggatggagtcccgcactccggccaccagctagcaatttacccgcactcccgtttaccagttagaagtctgtgcacgggtagtgtgtaaacctatctctattccttcatcctgattaggagagtccagaggagttttccaggtcaaggtgaggacatgagacaactaagtctgcatctcatttaccttagagtgttctggatttttttcctggaaaccgccttaattggtaattctaagaatcaccatctcaagcctgttttttgagggggctgcatttaagatactcatttcatcaatttttctattcttgttttactggtaaacaccaggcgctctctccaggaactcacctacctgggaggacagatgcctcaacatggactacagattccaaagtctgttcacagtttctacttctgtgtccaacttttcttcctccagtaaacacacatggtcaaagcagaatgcaatgtcctttcctcaggatccacaagagtcagattaaagaaaatggttttgttgaaataaacagctccttgcacggctcagtgactgaaaacaaaacatcagaaatcaaaaggtgcaccttcaagataatttctgttaatatttgtttatgcagtatgcagggttctgcatgaatatatgcctacatgccagaagagggcaccagatttcattatcgatggtttatgggccaccatgtggttgctgggaattgaactaaggaccgccagtgctcttaacctctgaaccatctctccagcccagcttcaaaactctggactatgataaataatcagaaaggcattgttataaatgtgttctaagccacacacacacacaaacagaaagtctttacttgtatgtgatgtcaaacataggaagaaccatctttattcaaggcttattttctgagcctgacatagagtgcggatgcttcttcagtgatgaatcaaatcctggtccttcatgctggtatttaaatcaatgtgcaggcgacatgtgtagtcaagtgcagtgctagtcacagagcatgggcgttgttgtcaatggaacagacagctgaaagacaatgtcaccttatactcttactgccttttaccagaaaagtagagcaggcagctaaggatgaaattccgagagctttgcaaggctagggtggtcttgggggcaaaagaggatgtttggttatcacttgtgccgaagtatctgccacggtgtcttccattcagtgtttgtaagatatctactttgtaccaaagcactaatctagacagtagtgatgtgagaaaaaagtacatactgtagtgagaaatcagaaggaaaaacaaactcctggagcaaaaaaaaaaaaaaaatcaggttcatggtatagttttataagtgattctgatcatacagaaatgtgtgtttggtggcagtggaagacagagacagagagaaagagagaagtccaaaggagaaaagaaacaagcgcattgtacattatactctatgaagaacagggcattgtacactctatgatgaacagggcattgtacattacactctatgatgaacagtagattactatgcagatttgattgatggtctcaagagagtctgagattcaggatatgattggcatccaagatgctgtcagtagttcaacctctgagttagaatttatactgcaaaatccactgaaagaggacagagatggttttcacaccaatgttcagataaaggagagggatgtggcactcaatgagtgtgttagatgtcgtgtggattctcggtacctaggagatggattcctaggacgacagagaaagctactgacaactaagcccccagaggccatgtgtgaagtatatggcaagtgtaaacatcatggctgtgttgctcctcaaagttttatacctacaaaactttactttgagtctaatttttgttccacaacgttgcttttggatcctcatcaattcaatgcaagaggttaactaataatttaattttgaaatagcaaaaacttccaacatgcatgtcatatttaatgaagaaattgaaacaggattaacagccaacaaggcagaggtagaaagataccgttctggagttaagaacacttgctgctcctgcagaaggcctgaatttggttcccagtacccatactgagcagctcacagcttcctgtaactccagctttggatgctcaaataccacctctggtgccccctggcacttgcatgcatgtgtagacatatacatgtaaatacatatctaaatagtaagaatagcagcaaaaaatgaaaaaacataagaaaacttatttctctctatttcctgtcttctaccttcatatcaaaaaactgaaaatcatgttttattcataggtacttaccaaccataatttaatggtctatcaagtaatattaaagaatatggttaataagatataaatttttaaatagctttggcagttcagaaatttagcaaatcatgagagaaatcaatgtgtctgaggttttcagagtggagactgatgagacatttttgttttgtaacctatgcctgggatatttcttttaataaatccatttagctaaactgttctggcatttgcttccctttttaaatgcaaaccaggacaagaaaaacattcaaatatgtcttgtcccttcaaggtcaatttggctaagtgtcattagtcaggtttcttcttccttatattaggcaagccacagtgaaatgattaaatatttataggtccagttgggtaacgataaatggaatagaaaatgcctaacagagaaaactaggtgtcaactcaaaagttctacatgggataggaggtattggaattttaaaacttatgtttcgcactgttgataagacagagttgatttgttttacaagggttagtaaatggtaaatctattaattgatgttatacttatctaaaaacgttgttagtaattcctgccctgtgcatttgtgatacaaagatgaggcagggttgtgagattttcattgcccagctgtgaatgcagtagtgtgtgcttgcaaacttctatcaggacaacactcagaggggcagtcaagaggcttatgtgtccaatcacatatatttagaaaacagtattaaaagtagccatgactagtaatccgtattattacatttgatttataaagccaatgtccaagaaagttgttgttgacaataacattgatgtgaaggggaagagggtgggctgaaactcagaccgaaggatgggaaattgaaggattagaaggtgaaaaggaaacagattcattataacatatcatgttggcccggatagatataggagaaagggaatccgttgcagacagtttatgaagaaagtattgccctggtagaaaggcttgctattcaattataattagttttaaaagggttgcacttatttgggggttggaaatgtcataaatgtttgtccaagtagctatagttaatttgatttgggtgttgacagggccatgcttagataatcactttccattagactggttagtttcccactaaagcagtgtgacaaggagacataactttctttagtcctattgaccaacttgttcttcaggcacagagagagtttgaaaagccaacttcagggaaatcactccacccagacactgggtaacacacccaatcccattcccttccaacaatcagttttgctgctgttagtgccaggagacccataaagaaagatcaccccagtgctgctcatgaataaggcctaattaaacgagggaaaactctgaaattttctttacaaatagggaacaagggacttgtcatcttgcctggttattacagacgagcacaagatttccttttcttggctttatcttattagggccacacttgttcaatccaaatcaaattgggattagataaacatttttcactattttttcccctgaagcttctatgtgtttacttggagatccatgctactatgagcaaattgaaattcaagcaacacttcttttcgtggtggagtcatgtgcagggaccggcaggagggtcgctttgagacagtggctgttttgtggggtgatctgagtaaggggattcaagcctgtgataacttactccatgtgtgtttctaatggtgctatactccaattttttaaagtatatggaagggagtcacttttcaaaggtgcatccctgtagttgtccctgtactttaaggtgtcccctttaaagtcctttgtactttaagctttctttgagcactgccttctgcattttctttccctggggactttcttttatcaagtggctagaatttgttgttcgtttagtacattctaacacatcttcttccaggcctttatttttgtgttgtaaaacttatctgtaacatccaacatagtacgctatggttattggaatttcaggacccttttctaattgcccgataatgaaagggaaatttgggtccccacttggagttctcagtctctttgatgaaataatttaggaatggactggaaaggaaattagtttttcaagtagctgcctcaagaaaggaggagcaagcagtagcaggggtgcacaccttttaatctggcatgggggtcacaccagtggctgacaagtacaagagggtctggagggaagcttcagggaaagggtaaggaagccccaaatgccagggaaaccccaagtgttacaacagcatgcttagaaaggacatgcaatccaggtaatggtggcataccctttaatcccagcactcagaaggcaggggcaggcagatctctaagttcaaggccagcctagagtgagagttacagaaaggacagccagagctagacagagaaaaatctgtctcaaaaaaataagcaaaaaggaggaggtgggagagggggagataggagagggtgggagagaggaaggtaggcaagaaggaggggaagagggaggggaggaggagaaagagggggaagaagaggagaaattaggtctctgtatgggcagatttataataagctcttgcagtaagaatggtaattctgctgggggtggaggtaaatatctcatttaatgggtaattatcccatgtttcactttagcgtggctaaaggtgaactcgccttcctagggatggtcccttgaccaagtcaataaccttacccaactgagtgttagttctcctcccacccaaagattctgccctcttgactgtgatttttttctgctctttatacttcctttaaaacatttaatacatctaattccctcttcccatttattattagaacatcacttgggttacatggccgtggcacttccggaaggctgccttcagacttgaatcctggcacgggtttaccatcccatcccccttcactgtgtaaaaagcatctttattgtcctttagcacggtactgtgttgagtgcaagaatcatctttactgacatattacttcatgaatccatgcagttttcccagatttgtctgttgcttattatattacttacaattatgtattcttctgtcttggggcattcattgcattttaatgaaaaaaaaatggatgccatcaacagcactaagtacagctgtgggctgcagtgttaagatacactcactgtttcaatttgtaggaaaaacagaaaatggaagaacataagctattctgaaactgcctggaagttacattttgttatcaaatcagattccaaccctcgtctctagcagtttgttttcatattttatgttaagggggggtaggtggggctagtaacagtggttttttttttttctccctaagacttttatctgttcattaaccatttgcaattttgaggactagtataccatgtcaaacatgctagctgatgccagttgaagaaggatgatgtcacacacagcccgataatatcatgctgcactgaatgatgtcaaatacaacgatgtgatatctaccagaaacaactggatgctgtcaggcacaggaggaagatgtcccatacaggaggatgatcttgaatacagcagcatgagggcagacacaagggaatgttgtcagacttagcagaatgatgtcagccacagcaggattgtgtcatgcagagctggatgatgtcaagcacagcaagatgatgtcaggcacacctggacagtgtcagacacagtgggaagatatcagacacagatggatggtttcaggcatgcttggatgatgtcaggctcaacagtatgctatcaggctcaggaaaaggatgccaggcacaggaggatgttctcagacacagctggataatgtcaggcccatctggatggttgcaggcacagatggatgatgtcacacacagcagagtgatatcaagcagagcaggatgatggcaggacacaaccgaatattgtcagacatggtagaatgatgtcaggtgcagcaggagtgtgacaggcacagccgagtgatgtcagaaacagttggatgatgtcagacccaacaatatgaagtttattgcggaaaataatgtcagactcaggaggataatttcagacacaggtggctgatgtcaggctcagcaggataataagacacagctgtcaggtacagctctttcatgtcagactcaggtacgcatcctagtcagctgtcctagccttttgagatgggcaaggaattttcatctcttttagtctgagattttattttattcaggatatgagtacaattacctgcttattgtggtgttgaaagttaaatatcataaatgcccaggtagcacctggtatgtactgttggtgaccaccgttatctgttaaacatgctatggctcattttctttcttttttaaaaatttgatttataattaattagctggaacccctgctcatcccctacacaagctgggaaaccccatctgccctccttcctccaactcctcccacacagagagagctttcaatgtttccagccacacacccaggagtgcctgctcagtttttgaccatgtatggacacaatcccagctcccaactgccacgtcatctctcctcacctacactctataaaacccctgcatgtgtgacttcactgaccaccatctatgagatcagtgagccccacctgaaagctgcctccgaataaacctgccttcatctacttttaaatctgttctgatctggcctatagccatgtcacccagggagataagaagcctatcaataataaaagttttattttgtttttcagagtttacatatcttatacaatctttcaaaactacatggccacacttacattaaatttaaataccaatacaaaatttttatagggccaagatggaaatcttggttctacctgtgagctatgatgtaactgttttatttcatatgtacaatttctttgatctatgcccttaagatatatgtacatcattgtcattttgttgtaattggatgcaaaggaagataggccttaaacactaatattttcaatgtggggtcttaacacattataatcatgtccatattcccacatgtagttctaaatgaaatgtcaggacagcagaaacatccaacgagtacataaaaccttgtttgctcagagtgttcactgcaccattttacctgaaagagcggcatcagaaaatatcaacgaaatgcctggtaatttgaaaaaaggctagttatacatagatcctatgatcttgtggttcattttctgggtatctctgactatatatgaatctattcatatgtttctatgacaacactcacaataatcttttctatagtagttaaaaacctgaagcactttacatttctttgtaggagaatggatacatgaacagtgacgtagtcctataatgcaacaaccgacttactactatatcatgaataactctaacaaaatgtgtaatgagagaagccagaagagtgcacaacctgcaaggggccctgtgcttttgtgagatcccacccatatgaaagaagcagaggcaaatgagactgttgcagtaggtattagagtcatggtaggctttagggacaagcttgctagtggaaattgactttggtgctagacaggatttgtagcttccatcttgtgatcttagggagttaccagaggggtgaaaatgtcagtctgaaagttgctgaaaggtcaggtgtcagaccagattgcatccgtgtttctcatgaaaacaaaaagaaaccacgatttcttcaacaccattagtggaaacattccataagagaattcagagtaagtgtatgatttctgttagtgaaaaataaagggaagggtattaaggagagtgatggagactttagaaggctctaactctcaccttggcattccagggtgacagcccttgaagatcattagtatttataaaacaggacactttatagaaagctcacatgtctaaccataggattcatagaagtgaaactagatcattgatacccagtgatctgattctttctaagctgcatatgaggctaaaagaactgtgacccttcctagagaaatggaaaaggactatttcctatgcagtgctaaaagtcattaatatgagaaaagaaactttaatgagagtctgctactacaacactcagacagtgacagaagagttttctataaaagctccacagtggacagacaagcacctaccgaaccagatgtgcacacgtggcaaagtcacatacaggatgccttactttcatttctgaatttcttagtttactcgttctggatctgagtccaaaaatgccaaaatacattttacattgttaagacaattaagtagcagttggctgggtggcaatgcacctgttgttcaaagccttcaacatgacaatcagcccaggcaagaaagatgggagaaggggagggagaaagagagagagaagggaattatgaaatgatgtaaaaatttcatgattacatttaataatatacatttttctttttgcactaatgtgttcctgtttctttacagcaccctgagaagtttcattttctatgagcaacagactttttttttcttctattgaaaaaaggttctttcgtcacataataatatatcatgatcaaaattaccctccttctcctcctaccagttcctccccctcccttcccattcagatgtacacttttatgtctctcagcagcaaacaaacaggcttctaagggataatagtagaatacatataatataataagagaaaacaaagttaacatattggaataaaaaaaaaaaacaaaggaaaagagcccaacagaaagcaaaggaaactaatagagacatggagacctgttccttcacacatccagcaatcgcatgaaaacacaaaacagaaagtatgtgtgtgtgtgtgtgtgtgtgtgtgtgtgtgtatgtctgtttgcatatgtgtgcatgtgtgtgtatatacacaaaacggatctgcagagagaagaaaatataaataagaatatattaaattaaatttataataaaaataagatgaataaaaaattaaaagccctgacatgacattataagggaagaaacctccaaagatgccggtgtgttcattttcagttgcccacctactttggggcatacatcttatacccaagagtattttatttccacattgagattcccttggagaaaattttattttattttatcaattggtgattacttctggattaggaagagggctaagtgtccacttctcttttcagctcaagcatccatctggtttcagacctttgcaggccctgtgcttgctgcctccatctctctgaatttagatgtgcatccatcgttttgatttagaggcctttgttttcttggtgttctccatcccctctaggtcttatatcctctttctgtaccctcttctgtggagttcctagagccctgaagggagggttttgatggagacatcccatttatggctgagtgatccaggatctctcattacctgcataacgtctgtatgtgttcttatttgctgcaggaggaactttccctgtgaatcacttagcaaaatattgatcagtgatgataatagaatgccatgaggagtcattttagtgctatattttttcatttgtttgtttttattaaaatagtagtatttggttttaccactagggctatctagtcggtttcaggttctcgccctgctagcagtgttgggtatgggtttaactcctggcatttggtttaagccaaatcagatcattgatttgtgatcccacgagcttcgtgctactgttacactatcatatcttgcaggccagacaccaatgtgaatcatcagattttgtgaccgagttggtgtttatgtttctcctttcataggatagaaagtacattcctgtaacaaagatactaaaatgtaagcgtggaggctcaatttagccaccagcttgacgtttccaccttcagtgagtcatgtgtcatctctagcagtggggctgtgacagaaagtgttgaaagtaacctgtagtcttggcaactgcccaggttgtttgggggttcccatgtgactcttttgaccagcttcacaaatagatataaactcaatcccagtaatgtaagatgggtttggtgacaagagatgtccaattgggcctatatctgtctcctgagttatttggtaatatcacatacacacacacacacacacacacacacacacacacatgagcaccatgtatgtcccatatatatttatatgaactatatattaggaagctaccactattactaggtttccatactacccctcaactggtgcctaattttaacagtctctcactgtactccctccatcacctctttccacacctcttgatcctcctgttccaggatcccccagccatccataactatctcttctatttcccattcctaatgagacctatctgccccctcaactccctccctcagtcccttacactatacctaacctctgaggttctgtggattgtagtttggcttttattggtttaccagcaaatagctatgtataagtgactgggtctgtgttacatcattcaggatgattgttttctagttttatctatttacctgaacattttatgatttcacttttctaacagctgagtagtgctccacttaatggaccacattttccttattattatcatctgttaagggacatctaagttgtttccagtttctggctattgtgaaaagggcaacagtgcacatggctgagaaggtgactttggtaagacaaagcatgcccaagagtggtatagttaaatctttaggtacacgactcccttcttcctgaggaactgccacagtgactgccacagtggctgtacacgtcttcattcccaccagaactggacgagtgtttcccttcctccccatcctccttgccatcaggagctcgcacttgtttctgtcatcttagctggtctgaggggtgaagattaaacctcccagtaatcttgatttatgtgttcctgatgattaatgatgttgaacattcccctgtttctcagccattgatgtttcctcatttgagaattctgtttggatctgaccccatttttaaatttagctgttttcttgatatctactttttgttttacttcttttttttttaatcttgggatgttattcctctatcagatgtgtagcaggtaaaaatcttttcccattctgtagcatgctgctttgtctttttttttaattaggtatttatttcatttacatttccaatgctatcacaaaagtcccccacccacccacccactcccacttcttggccctggcgttcccctgtactgaggcatatagtgtttgcacgcccaatgggcctctctttccactgatggctgactatgccatcttctgatacatatgcagctagagacacgagctccggggtgtactgggtagttcatattgttcttccacctatagggttgcagatccctttagctccttggttacattctctagctcctccattgggggccctgtgatccatccagtagctgactgtgggcatccacttctgtgtttgctaggccccggcatagtctcacaagagacagctatatctgggtcctttcagcaaaatcttgctagtgtatgcaatggtgtcagcgtttggaagctcattatgggatggatccccggatatggcagtttctagatggtccatcctttcatctcagctccaaactttgtctctgtaactccttccatgggtgttttgttcccaattctaagaaggggcaaagtgtccacactttggtctttgttcttcttgagtttcctgtgttttgcaaatttatcttatatcttgggtattctaagtttcaggactaatatccacttatcagtgagtacatattgtgtgagttcttttgtgattgggttaactcactcagtatgatgccctccaggtccatccatttgcctaggaatttcataaattcattatttttaatagttaagtagtactccattgtgtaaatgtaccacattttctgtatccattcctctgttgaggggcatctgggttctttccagcttctggctattataaataaggctgctatgaacatagcggagcatgtgtcctcataaaattgcaaagcttctgcaaggcaaaagacaccatcaataagacaaaaaggccaccaagagattgggaaaggatctttacctatcctaaaccagattggggactaatatgcaatatatataaagaactcaagaaggtggactccagaaaatcaaataaccccattaaaaatggggctcagagctaaacaaataattctcacctgaggaatgccgaatgtctgagaagtatctgaaaaaatgttcaacattcttaatcatcagggaactgcaaatcaaaacaaccctgagattccacctcacaccagtcagaatgtctaagttcaaaaattcaggtgacagcagatgctggcgaggatgtggagaaagaggaccactcctccattgttggtgggattgcaagcttgtacaaccactctggaaatcagtctggcggttcctcagaaaattggacatagtactaccagaggatcccacaatacatttcctgggcatatatccagaagatgttccaaccggtaagaaggacacatgctccactatgttcatagctgctttgtcttaatggcagtgtccttcgctgtgcagaagattttcagttttatgagatcccatttattagttgttagtgttagtgattagactaatggtgttctgtttagagaatcttttcttgtgccaacgaatccaagccaatgaaactcttgcttctgccaagtttagtgtatctggatgtgcattgaggtctgtgtagagagacaactattttaattttcatcaattatattaggtgtattttactcatcttcaggaaacatttgaacagcaatactttcaagaaacctctaaaatatgccccgaagtgatattttcattgagtttgtgagtgttggatgtaagtagcaaaggtcctggttttaaatataaaagaatttttaaaaagtgtttgagattctaggtggagaggaattctccccttaccaatcccccatcaggtctgtttacttccctttgaccagagctcattgtttttcaattgaaagattactatctggaacttatctatgtatttgagtgtatatctcctacactgttttatataaatcattgcacattagccacgatgctttcagctgtttttagccattcatgctgctatttagaatatcaatatttggccatttcaaataaggctatatacaataactttatatccatactattaagtatgtattggactgttttgcaacattccttcttattgggatgtatggcttcagaattttacaaatagtaaaattttggaaattttacttcatgttggcagatttttgtagtgcaatactatagtaacaaaagatattaacagacctcgtgatacttactctacagttctctaagtgctcaacactcgttacccagctctaaaagacataagtactgtaatgaacttttatttgtaatacctcctttatttatgatttccttaactataaacatacccttaaattgtgtttatatatattcttaaatagcacagtactttcgaacatatgtaaattgaaacgcttaataaattattgtctaatttgtatcttcttcagatcttttttattaattaatttatttttttacactccatattttatcccccatccaccctccaaaatccaatacctccatccatatctcatacctccttcctactcacctgtctccacgttcgatgtcccttccccctaccccacctgacctctaaactccctggggcctccagtcttttgagggttaggagtatcatctctgaatgaacacagacctggcagtcctctactctatgtgtgttgggggccttatctcagctggtgtatgctgcctgtttgttcaggtccaatgtttgagagaccttgggggtccagattaactgagactgctggtcctcctacataaccactctcctcagcttctttcagctatcctaattcaacaacaggggtcagctgcttctgtccattggttgggtgcaaatatctgcatctgactctttcagctgcttgttgggtcttttgggggacagtcatgataggtccctttttgtgagtgctccatagcctcagtaatagtgtcaggccttgggatctccccttgagctgcatcccactttgggcctgttgctggactttcttttcctcaggttcctctatatttccatccttgtaattcttttttggggggtggggaggagaaaaacaaaccaattttatttctttttttttcattttttatcatattctttaaattttataaaatattgtaacaataaaaatgagtattataaaagttgtttgatataaaacaacaatcaattgaacagtcttatgtagatgtttgtctacagcaatactgaaaatacatacattttctcaatataaattttaaataactccaaatttattaactgtatattttaaaataatatatcactattttttaatgaacataaatagataaagtctttttgtttgtttgttttgcttttaatagaacttaaaatcttgtacaaacacaaaatatgaacagtttttggacattggagttcattgtaataaggctgtacttgaatgtcactcacatcaccaaaggattttacctccatagtagctaagccaagagttgacagttctgctatgccaaggaatgaattgtaggcacaaatttggatatagatttcctgctacagtcaaagctatttgacttgagtggttgtcgtcattcttagcctacagggaacaggttacattcatttaagaaatggtgtgtgtattaagatggtgtatccatgaagtcattcatcaactctttcaatgaacaataattctgcttggagggtggcacagacattaggagaggttaagattctggttcattggctgtgatgattttgaaaagcattcatctcagaataagagtaacttataaagtcctcttcttcaaaaatgatacaataattataaatattaagcaaagccttcagtctcactctgctgttctcttacaagccacctcccaaatcagttgtctacatttattttggctgtataaataattttgaaatatgtaagctgttttgaaaaccatagtatagtgtaaaaacaccaaataaataatcctattaataaagtgactgagataggaggagcatgatttcaagaccattatgtggcacacagcaagaccctgtcatgtacaaacaagcagaaagtgtatatggattgtacaatattggacatttttctcccattaccaaattagacagacagccaacaaatttctaattcctcatatatttgaatttcaatcaattaggatatgttggtaatattaattttcatattaagagatattaaggagaagtggttgttaattttcttgttagaggtggaattatgtttgtgtgggtttgttgttactttcttgcttcttctagggtggagtttcactccttgtgttggtgtttttcatctattatcctgtatagggctggatttgtggaaagatattgtgtaaatttggttctgtcatggaatattttgttttctccatctatggtaattgagagttttgctgggtatagtagcctgggctggcatttgtgttcttttagggtctgtatgacatctgcctaggattttctagttttcatagtctctggtgggaagtctggtataattctgataggtctgcctttatatgttacttgacatttttcttttactgcttttaaaattcttcctttgtttagtgcatatggtgttttgattattatgtgatgggagggatttcttttctggccgagtctatttggagttctgtaggcttcttgcgtgttcatgggcatctctttctttaggttagggatgctttcttctctaattttgttgaagatatttactggccctttaagttgggaatcttcactctcttctatacctattatccttaggtttggttttctcattgtgtcctggatttcctggatgttttgggttaggagctttttgctttttgcattttttcactgttgtgtccatgttttctatggtatcttctgcccctgagattctctcttctatctcttatattctgtcggtgatgcttgcatctatgactcctgatctctttcctagattttctaactctagggttgtctccctttgtgatttctttattgtttctatttccatttttagatcctggatggttttgttcctttccttcacctgtttgattgtgttttcctgtaactctttaaggaatttttgtgtttcctctttaagggcttctaactgtttacctatgttctcctgtatttctttaagggagttattaatgtccttcttaaaatcctctatcatcatcataagaagtgattttaaaactgaatcttgcttttccagtgtgttgaagtacccaggacttgctatggtgggaaaattgggttctgatgatgccaagtaaccttggtttctgttgcttatgttcttacacttgcctctagccatctggttatctcttgtgctacctgccctgactgtgtctgactggagtctgtccttcctgtcatcctggttgtagaatggttgtagagtttgtgctcaaggtctgctcaggactccagctcagacagaccagaaggaacctgtaccactggtctggtggagttcctgcatgactgggccccaccggtcccagttactcccgctgtaggggacagatgttatgtcctcttcacctctgatcctctaatcctgggcacactggaacacctgggggtgaagatacctctgggtgttgtgggactggctgcagagtttgctcccaaggtctgctagcggcactagctcagacagactggccatcctgtaattctttcagacaggaatgtttatgagtcagagttgtgactgtgggatgaccattccatccctcacttgatgtcctgttttcctgctggaggtgggctctataagttccctttccctgctgtcaggcatttcatctaaggtccttccatttgagtcctgagagtctctcatgtcctaggtctctggtgcattctgagggccctcctaacctcctatttcccaaggttacctatttccattctttctgctgctctcagggcttcagtccttttccctcaactaatatcaaatcaggtacccctcttgtcccccccactacctctccctgtccactcccccccccaggtccctccatccatccatccacatttgtgactgctttcttctctttcccaagtgagactagggagtcctcaattgggcacttcagcttgttgacctttttgagttctgtggaatgtatcttgggtattctgtacttattccagggggtggggatgctaatatgcacttattagtgagtacataccatgcatgtccttttggatctgagttacctcactcggtatgatattttctagttccatccatttgcctgcaaaactcgggatatcctcgtacttaatggctgagtagtattccattgtgtaagtgaaccacattttctgtatccattcttctgttgtgggacatttgggttgtttccaggttctggctatcacaaataaggctgctatgaacacagtggaatacgtgcccctatgcatggtggggtatcttttgggtttatttccaagagtgatatagctgggtcttcaagtagatatatttctgattttctgaggaacctccagattgatttccagattggttgtaccagtttgcaatcccagcaatggaggagtattcctctttctccacatcctctccaacatgtgctgtcacctgatgttttatcttacccattctgattggtataaggtgaaccttttgttattagatcatccattgttgggctcagaacattaggatttgcttttgtttctttccttttttttttcttgtatggtgtacaacacaaaaatatactgctatttgtcttaacccattctagtttatagacctatgaagccaattactttttgacatctcaatgtttttgatgaatatccctgtcattgatcccagtgctctttgttctgagatcttgccattttggattgtgtacagagtagtgctttagaggtgtcagtaaaaaaatactcaacagaaatagtaagagaggattttttattttggctcagtggtttctaaggttccagtgtgtagacactggttcagtgtttcttggcccattgtaagatataacatcgcggtaggaattgtgtggtagaaaaaactgtcactcagggaggacagaaagcagaggaagcgtcattcaggaagaagccagggtaggacataaccccaaagaccttgcctaggtgacctccttcctccagctttacctcacctcctgtctttaactatttcccaataatccatcttattatgagtgcatcaagtgattactccactttcaggcaggccctcttagtataatcatcctttggaattctctcacaggaactctcagaggtgcttggccatctcctcagtgctttttaatccaatcaagttgacagtctggataagtgatcacaaatggaacttctgcacatcctgccaaggcccaatttccaatgttgctctgaaattcttttccaaggaaatgctagaggcttacattttcccccaacgtgaatgaggcttgttagattaatcctggatggcaactaatgttgcccagcattttatccaagtgaatgtaaaatcatatcttagcatgtttacatgtcctggtctttactcctaaagaaactaaacgtcttcaatgtattcttgcaggtgtttgcttctttgaattatctcttcaggtgcttgcctttgttgttcctggatcttttattgtttattatttacttgattatttatttattacttaatatttattgctttggagtgaatgatatatttgtcagtggaatattttaaactttgaagttctatgcccacactccataactgtaaacttgcctcagtaatataaatatttaagaccatgttttctcaactcctagtttatccaggctaaccaggtctgcagaatgagttctagaacagccaaggctacaccttttattggaaaccaaaaaaaacaaacaaacaaacaaaaaatgtattttgcctggggtggtggtacatacctttaatcccagcacttaagcctaatctgtagagtgagttcaaaggcagccaaccaaggcaaaacacaaaacccctgtcgcaaaaaaccaaacataaaccaataaattttatttcatgaaatatgtatactctaattaagttctaaaaaaaaagtatagcctgtgggaggggggctggagagatggctcagcagtgaagatcactggccactctttcagagaacctgagttcaattcccagcatccacatggcagctcactactgtcttaattcctgtttcagctgatcagataccctcataaagtcatacatgcaggcaagacaccattgcacataaaataaacaaataaaatatataaacaaattatgttttaaaatgtagcctggtttccactgtttcttctttgaaatctatggcattttttaaaaggatgaaatcttataacttttttgatgattgattttaattaaattctaatgtcatcaaagaatatgtacagaatggtatcagtcagaattttcaaatttgattagctttgctagtttgccaaagtttctgcaagtattcttatatcatataaagtctccattaattcaaacttgtaaagttgacaattatgaaattataaattcacttgtctcatatcttttaggttcaacccatcaattctaaacattttctttgtatgttaaggtagtgaatgttctgatttcatattcaaacgtttgagtgtgctgcttgcctggatggttcttgtgacccagatccaagtttcacagtagcttttattgatcttacttcattgatttttttttgtgcattattgggacatttgattagctgacagcatgaaaattaaaagtcggttctgatataacaaaatgatcatgggccccaatcagaaaattgaagacctagaaagacttgagaaaagagggatagggtcatgggctttagccaaaggagagtatggaaataatgagttcaagtacagatgtcagtgaagcaaagcacacatttagcagctccttaaggaaagaccataatttgtggccttggcaaggcatatgagggagctgtatgttacagtaaattgtcctgcagtccttacccactctctccagagtgaagggtaattgtgtttaattacctgtgctttgcctttggtttgaacctactaggtcaaggaaatttcttcttttaaacaaaaatagcaagatccattgattttgattggaatattttagtgaagtgtgtgcatgtgcatggaaacttcttgggcctaaagcacccctggtaagccatcttaggcatttctctattcaacaaaatatgcacaaacattcaaatcactgcttaaagttttagtggcgattttcccccatgcctctcctcccagtgcattaaacatttaattctgtccatctcagaaaaggaaggaggaagaatgagacaataaacaatccacgaaatcttacagattcttctgcatttatatgcatatagcctctatttaaagatatgaatctaatatctgatattatatccaacacaaaattatttgcactcatctaagtttttaagatctgtgatttttaaaaatttattatatttgttttattttttaaagatccattcttttttctatgtgtatctgtatgggcatgtgggagggtgtctgcacgggtgcatgtatgcatcatgacgcatatgcgtgatagatgtgtaagtgcccacaaaggctgaggtggatgtctgattctccatgggaccaggagttacaggtgggcatagccacctgatgttgacacgaggagttgagcttgggtcctgtgaaggagcagcatgtagtattagccactgcgccacaatatctgtaagttgttttaaagcataaacacttcgtagtataatttttattccaaagttccttcaaaatatgaaaattttctagaaagctagaaatggaaaaaatatataaagatacataaaaaaataatgagttaaatacagaaatctggtctattgggctatgtttcataatacccaaagcatgatgcgaaaggtaaagtatgaaagaaaacgtctagtcactattgggacattgaaattttattttctattgttggtctaaaattagagtcttatgtgtcaatgttctgttttatgaaccaaggtcatggtgtctgcattttagagtatttctatcttaataaagcagaatgaacatttaaaggaaaaatgatctatgggattctttttagctgttgagtttaccagctcctcaataactctgccttatcagctactaagtctccaggcaccacctgatcttacccattaaaagctaggtcagctgcaccttctggttgctaagcagctataggggatgcagttgcttcctgacctgtgtctcatgccacctgcatttcatgctaatctccccgacttcccaggggcttgctagagctttccttgttcttgtctttgtttatcatgtcagctataaatattacattctttgtcagcttttagcaggcatatttctggatgctaaatatggtaaagttatatgaactgactcaagcatctcattaaatagacatagatcaccatgaagccagttgtggaattgggaaaacatgaatgagaataaattagcatttaaaaacaaaattaaaacccaaaaactctatttcccttcagttttttttaattttttcaaaatatactggaatgtgaagatagatgtgagatagaaagaaggggaagaagagacagtaaatagacatgtgcttgggggcagcaggactgcagggagaaaggaggaaacatgggaggatcgaacaagggaataacttggaatgtgatctttgagagacatcgttagtggatatgaatggtcacagcactgctcctggacaacaggcttataaaaactctgtgtttagttttatagctacccaggctgggaattcctcggggctacaaattttgcccttctagtgcttcagagcgactatgtgacccccacagcagggctggtatgcaggaggctgtctccttacagtgactgattgattccccgccccccccccgccccctgcccaaagttacatcaaagcatagaggagccttccacagcacacaatgaactttgtagagttgaagttgtagccaaggcagtcgtgtttccgtgtttccatcagacagacgagctccctctcccctcagctttccttctgttagaggcaacaactggtattcgatacagaaagatatcagttttcttggttgtactgctgataaatcagctgcatctttgtttctctgtggaagaggtatttgaagtatgtttaggcaaaagtatagaaaaaagtgagttgcccacatgatggatgtagacagggatccaaagctgagtgagtcgtttctggggttcgtggggtactcagcagaggaatgcacagcttcctcgaaccagtgtgtggagtgtgctgagggagtttctcccctggctttctgattttcagaaatgacccatgcaaacagcaaggtcggtgtctccctgcacatccttaagtcccttcttttgctatgtacactagagcatttattttccagaatgaatttattagaactgtaacttttgtaaaaaatgagtatgtccatccagaatttatttccaaccattttaaaggagggtagattgtccaattatcatttaaattatcctaatttgttatatagatgagacatgattttattatactgtcattaattaaaaatgtactataatacagtgaatacatccatatctgcacttaaatatgtcactgagtagttctaatgactgctgggaaagaaaagtcagaagtatatgtcaaaacgcatgcaaatggcattccatttaacatagaaattatgtttatatgggtgaaattttaataaagttattattgaaactgcttacaattgaaatatgtttcagttataatgatgaagaaaataatataaaaaagtcagagaatattcattagttggaacatgtttttgaggaaagacaattttgttatgctcagggcgtaattcacaaaaaatcagtaccttccagctaaggctcacccagctccacatgttaaagggcagttacaatacagtcatcccaatccaagaatagatgccctttaggttctgacctagaaaaaattttcctatagttaaattggatgtaaatcgttatatgtattatggttggtggcagatttgctgtgaagatgggcaggtgaagcctcggatacaggctgctcactacacagaccttcacagactttcccagggcaggtggcaggacatgtcatactttgtcatttctcctgcaattttaattttttttcttgctgtaatttttcttctttgatcatgcatgttccagatgccagtaagccaagccttacctttggttataattttaaggctataaaacagagtgtccatgatcagagaaaactacaatgaggaatgactacatcactgatggcaggaaggcagtgatggtggctttgtgagacttttctttttttctaattttcacatctttgaaaagctgtttcattcatatataattaatttggagacaattttgcttactagagctggcttgttttgaatgttttctttttagttaatacaaaataattgtatatatgtctcaggtacagtgtgacactagaacacatggatataacataaaacaaacacccatagttcactggcatagccatcatctcaaatgtctgtgattttctctctgtgtatatatgcatctctctctctctctctctctctctctctctctctctctctctctctctctctgtgtgtgtgtgtgtgttctgaataatcatacctctgtctctctcaaatatatattcttgaaacttgctgacatagaggtaaactattttttactttctaaaaatttattttatgtatatgagtacatatatacatatattttatgtatatgcgtatgatatcttcatgcaaacctgaagagagcatcagatcctattacagatggttgtgagccaccatgtggttgctggtaattgaaagcaggggctctgaaagagcagggagtactcttacccattaagccatctctcaagcaccaggaactatttttaaaaagaaagaagttcatggatttacaggatgaaatgtgcactctacacttacacacactataggagaattttgtgggtttggtttgcagttctgaagtctgtcttcctgtttatatagttaactcctccattgctattattttcattaataatcagcagagatggctaagtagcaattcacctccaaatcttatagcttggctgggctcttctttggagtctcccacatgatcacagtgaggtggttgttgcaactaaagtactctacaaggttaagcagagggaggcatctcacatgatctccccttctgtgtctggtgtttctgtgctcttgacaaaacctcttggaatggcagaatagcctgaacatacagtatgacaaatcagtactccaagaaggaaggcatctggaattgggagaacatctccttcatcacattcagggggttggcagagttcttctgtctgtgacagtgtcaagcaatgcagagagagagagagctagtaatagccttcttcaaacacaggataccacataaggaacatttgaattttacgttgactctaacagagggatgtgtctgctaggtagagtaggcacaattttagaaatacagacgtgatgtaattcccttcctttataaacagttattcacagaagcaaccacattgtcactaacaccaagagtacaaagctctgaacttctcttcctttaagtaagagagaagttgcttaagaggttttagaattggcaatcacttcagtggctatcaaacttccatgtctatttctcactaggcttaaatggtcttcattctgcaacaccattgcctcagcagtgccaaacacagccatttccataacgttcatcatgtaccttatcatttctctcatcagtcgtatcagtactattagactatgttatatagaaaaaacatcttcagtgtttttcaagtctttagaaagaaaaacatacagttttatggaagaggccacaaatccccatacctacaaatgtttactcatacagcagcataaggaatcttaataatgattaatgtgcagatctaggcacacatggtgacttcctgtggaactgaattacattctcagaaaactagatctaacatatccatacctatggtaggcagatatagaacagctggatcagaaacaagtatggataataaccaactggaggactcaagagctcagtggtagcatttggccatttaaagtgcactgtagacagaccactctggtgctgggaccaccagttatttttttctgtcattgaaatcaatctgcatagagaatggaacatggatagaagatttcagtttactattaagagtaattttgtgtaatattcataatttgggggaaattactaacatttgaatcagaatttaaataagatattaactgcttcctcctgaagtcaagtgcccgaagcgcaggtatttatcgttttaggatcagagtgattatagagaagccagggaagcaaaggaaagagagctctctagtgtgcccccaagccagcatcaattagtcatgactgctgaccagggctccctgtccaccatgcttctttgctagccaactaaagtctgactcatgtctacgtttaaaactgagtttgcattgtaatatcaacattctgtggattcagttaatcttgtaagtaacaaacaaagagtcagggaaattaaaatatgtacacactataaaaccaaattatttgcagtggttctcacaaaagaatgtgctcaaaacggattatgccacaatggctacaactcacccaagacccaacactagtttcctttttccctctggtgctcccttgatacatcactcttttctatcaaagatgtcaaacagtcctcacttttgccatcagactgtgacagtgcaagtgtgggacctgccaatgggataacggatggagaggttctgttacactttccatccttgactttattttcataactaaactttaatcaatcatctcatcagatattttaatcccaccttttattctatcacagccacagcagagatggaatttaaggtcaccaaaagttcccatagtctttgattctcatgacaagttagaccatttgcaagactacgggatactgataaatgagaagactggagaaaagaatttaaaactcttggtctctgatatttgaaaaacaattttagtgacaatattgctgatgctggggacatagaatttaaaaggagtaacaagttaagattcctcccttagaggacaaggagtaagaaatgagtttgctatttgactattgtatcccataacacttacaacaatgtttactataaaaaggtcttccttcctctctccctcttcctctccctccttcagactcccttctttattttttttttactttcttttatttaaatgtcaatgcaacatgaatgctatcggaatttatcagaaggagaaacattcaatgcttagtttactgggctttgaacaagagtctttctataccataaaagcactcctgagcctggaagacacaatctgtcctctcacactcccttgattctcttttattagcttaatggttgacaagaataagaattattgagtaataggttacaacaaaaacaactgattcagttgcccaaaaagcagtggcacatgtttggagaggtgtttgcagtcaccatcacaaaggtggcacagtgtgtccgtcattgagacatggcacagtaacccaaacagatggtgttttatgcttctaggtatcagtttaagcacaaattgaaaaagataaatgaagtatgcttgagttttcctctcagggcagtagtcacattgcttaggagtaggagttgatttttttttcttttttttttttttcttttttttattaggtatttagctcatttacatttccaatgctataccaaaagtcccccatacccacccacccccactcccctgcccacccactcaccctttttggccctggtgttcccctgtactggggcatataaagtttgcaagtccaatgggcctctctttccagtgatggccgactaggccatcttttgatatatatgcagctagagtcaagagctccggggtactggttagttcataatgttgttccacctatagggttgcagatccctttagctccttgggtactttctctagctcctccattgggagccctgtgatccatccaatagctgactgtgagcatccacttctgtgtttgctaggccccggcatagtctcacaagagacagctacatctgggtcctttcaataaaatcttgctagtgtatgcaatggtgtcagcgtttggatgctgattatggggtggatccctggatatggcagtctctacatggtccatcctttcatctcagctccaaactttgtttctgtaactccttccatgggtgttttgttcccacttctaaggaggggcatagtgtccacacttcagtcttcatttttcttgagtttcatgtgtttaggaaattgtatcttatatcgtgggtatcctaggttttgggctagtatccacttatcagtgagtacatattgtgtgagttcctttgtgattgtgttacctcactcaggatgatgctctccaggtccatccatttggctaggaatttcataaattcattctttttaatagctgagtagtactccattgtgtagatgtaccacattttctgtatccattcctctgttgaggggcatctgggttctttccagtttctggctattataaataaggctgctatgaacatagtggagcatgtgtccttcttaccagttggggcttcttctggatatatgcccaggagaggtattgctggatcctccggtagtactatgtccaattttctgaggaaccgccagactgatttccagagtggttgtacaagcctgcaatcccaccaacaatggaggagtgttcctctttctccacatcctcgccagcatctgctgtcacctgaatttttgatcttagccattctcactggtgtgaggtggaatctcagggttgttttgatttgcatttccctgatgattaaggatgttgaacattttttcaggtgtttctctgccattcggtattcctcaggtgagaattctttgttcagttctgagccccattttttaatggggttatttgannnnnnnnnnnnnnnnnnnnnnnnnnnnnnnnnnnnnnnnnnnnnnnnnnnnnnnnnnnnnnnnnnnnnnnnnnnnnnnnnnnnnnnnnnnnnnnnnnnnnnnnnnnnnnnnnnnnnnnnnnnnnnnnnnnnnnnnnnnnnnnnnnnnnnnnnnnnnnnnnnnnnnnnnnnnnnnnnnnnnnnnnnnnnnnnnnnnnnnnnnnnnnnnnnnnnnnnnnnnnnnnnnnnnnnnnnnnnnnnnnnnnnnnnnnnnnnnnnnnnnnnnnnnnnnnnnnnnnnnnnnnnnnnnnnnnnnnnnnnnnnnnnnnnnnnnnnnnnnnnnnnnnnnnnnnnnnnnnnnnnnnnnnnnnnnnnnnnnnnnnnnnnnnnnnnnnnnnnnnnnnnnnnnnnnnnnnnnnnnnnnnnnnnnnnnnnnnnnnnnnnnnnnnnnnnnnnnnnnnnnnnnnnnnnnnnnnnnnnnnnnnnnnnnnnnnnnnnnnnnnnnnnnnnnnnnnnnnnnnnnnnnnnnnnnnnnnnnnnnnnnnnnnnnnnnnnnnnnnnnnnnnnnnnnnnnnnnnnnnnnnnnnnnnnnnnnnnnnnnnnnnnnnnnnnnnnnnnnnnnnnnnnnnnnnnnnnnnnnnnnnnnnnnnnnnnnnnnnnnnnnnnnnnnnnnnnnnnnnnnnnnnnnnnnnnnnnnnnnnnnnnnnnnnnnnnnnnnnnnnnnnnnnnnnnnnnnnnnnnnnnnnnnnnnnnnnnnnnnnnnnnnnnnnnnnnnnnnnnnnnnnnnnnnnnnnnnnnnnnnnnnnnnnnnnnnnnnnnnnnnnnnnnnnnnnnnnnnnnnnnnnnnnnnnnnnnnnnnnnnnnnnnnnnnnnnnnnnnnnnnnnnnnnnnnnnnnnnnnnnnnnnnnnnnnnnnnnnnnnnnnnnnnnnnnnnnnnnnnnnnnnnnnnnnnnnnnnnnnnnnnnnnnnnnnnnnnnnnnnnnnnnnnnnnnnnnnnnnnnnnnnnnnnnnnnnnnnnnnnnnnnnnnnnnnnnnnnnnnnnnnnnnnnnnnnnnnnnnnnnnnnnnnnnnnnnnnnnnnnnnnnnnnnnnnnnnnnnnnnnnnnnnnnnnnnnnnnnnnnnnnnnnnnnnnnnnnnnnnnnnnnnnnnnnnnnnnnnnnnnnnnnnnnnnnnnnnnnnnnnnnnnnnnnnnnnnnnnnnnnnnnnnnnnnnnnnnnnnnnnnnnnnnnnnnnnnnnnnnnnnnnnnnnnnnnnnnnnnnnnnnnnnnnnnnnnnnnnnnnnnnnnnnnnnnnnnnnnnnnnnnnnnnnnnnnnnnnnnnnnnnnnnnnnnnnnnnnnnnnnnnnnnnnnnnnnnnnnnnnnnnnnnnnnnnnnnnnnnnnnnnnnnnnnnnnnnnnnnnnnnnnnnnnnnnnnnnnnnnnnnnnnnnnnnnnnnnnnnnnnnnnnnnnnnnnnnnnnnnnnnnnnnnnnnnnnnnnnnnnnnnnnnnnnnnnnnnnnnnnnnnnnnnnnnnnnnnnnnnnnnnnnnnnnnnnnnnnnnnnnnnnnnnnnnnnnnnnnnnnnnnnnnnnnnnnnnnnnnnnnnnnnnnnnnnnnnnnnnnnnnnnnnnnnnnnnnnnnnnnnnnnnnnnnnnnnnnnnnnnnnnnnnnnnnnnnnnnnnnnnnnnnnnnnnnnnnnnnnnnnnnnnnnnnnnnnnnnnnnnnnnnnnnnnnnnnnnnnnnnnnnnnnnnnnnnnnnnnnnnnnnnnnnnnnnnnnnnnnnnnnnnnnnnnnnnnnnnnnnnnnnnnnnnnnnnnnnnnnnnnnnnnnnnnnnnnnnnnnnnnnnnnnnnnnnnnnnnnnnnnnnnnnnnnnnnnnnnnnnnnnnnnnnnnnnnnnnnnnnnnnnnnnnnnnnnnnnnnnnnnnnnnnnnnnnnnnnnnnnnnnnnnnnnnnnnnnnnnnnnnnnnnnnnnnnnnnnnnnnnnnnnnnnnnnnnnnnnnnnnnnnnnnnnnnnnnnnnnnnnnnnnnnnnnnnnnnnnnnnnnnnnnnnnnnnnnnnnnnnnnnnnnnnnnnnnnnnnnnnnnnnnnnnnnnnnnnnnnnnnnnnnnnnnnnnnnnnnnnnnnnnnnnnnnnnnnnnnnnnnnnnnnnnnnnnnnnnnnnnnnnnnnnnnnnnnnnnnnnnnnnnnnnnnnnnnnnnnnnnnnnnnnnnnnnnnnnnnnnnnnnnnnnnnnnnnnnnnnnnnnnnnnnnnnnnnnnnnnnnnnnnnnnnnnnnnnnnnnnnnnnnnnnnnnnnnnnnnnnnnnnnnnnnnnnnnnnnnnnnnnnnnnnnnnnnnnnnnnnnnnnnnnnnnnnnnnnnnnnnnnnnnnnnnnnnnnnnnnnnnnnnnnnnnnnnnnnnnnnnnnnnnnnnnnnnnnnnnnnnnnnnnnnnnnnnnnnnnnnnnnnnnnnnnnnnnnnnnnnnnnnnnnnnnnnnnnnnnnnnnnnnnnnnnnnnnnnnnnnnnnnnnnnnnnnnnnnnnnnnnnnnnnnnnnnnnnnnnnnnnnnnnnnnnnnnnnnnnnnnnnnnnnnnnnnnnnnnnnnnnnnngatccacttagatttgaccttagtacaaggagataagtatggatcgattcgcattcttctacacgataacaaccagttgtgccagcaccaattgttgaaaatgctgtctttcttccactggatggttttagctcccttgtcaaagatcaagtgaccataggtgtgtgggttcatttctgggtcttcaattctattccattggtctacttgtctgtctctataccagtaccatgcagtttttatcacaattgctctgtagtaaagctttaggtcaggcatggtgattccaccagaggttcttttatccttgagaaaactttttgctatcctaggttttttgttattccagatgaatttgcaaattgctccttctaattcgttgaagaattgagttggaattttgatggggattgcattgaatctgtagattgcttttggcaagatagccatttttacaatgttgatcctgccaatccatgagcatgggagatctttctatcttctgagatcttctttaatttctttcttcaaagatttgaagtttttatcatacagatctttcacttccttagttagagtcaagccaacgtattttatattatttgtgactattgagaagggtgttgtttccctaatttctttctcagcctgtttattctttgtatagagaaaggccattgacttgtttgagtttattttatatccagctacttcaccgaagctgtttatcaggcttaggagttctctggtagaatttttagggtcacttatatatactatcatatcatctgcaaaaagtgatattttgacttcctcttttccaatatgtatccccttgatctccttttgttgtcgaattcctctggctaatacttcaagtactatgttgaaaaggtagggagaaagtgggcagccttgtctagtccctgattttagtgggattgcttccagcttctctccatttactttgatgttggctactggtttgctgtagattgcttttatcatgtttaggtatgggccttgaattcctgatctttccaaaacttttatcatgaatgggtgttggatcttgtcaaatgctttttctgcatctaacgagatgatcatgtggtttttgtctttgagtttgtttatataatggattacattgatggattttcatatattaaaccatccctgcatccctggaataaaacctacttggtcaggatggatgattgctttaatatgttcttggattcggttagcgagaattttattgaggatttttgcatcgatattcataagagaaattggtctgaagttctctatctttgttgggtctttctgtggtttaggtatcagagtaatagtggcttcataaaatgagttgggtagagtaccttctacttctattttgtgaaatagtttgtgcagaactggaattagatcttctttgaaggtctgatagaactctgcactaaacccgtctggtcctgggctttttttggctgggagactattaataactacttctatttctttaggtgatatgggactgtttagatggtcaacttgatcctgattcaactttggtacctggtatctgtccagaaatttgtccatttcgtccaggttttccagttttgttgagtatagccttttgtagaaggatctgactggtgtttttggatttcttcaggatnnnnnnnnnnnnnnnnnnnnnnnnnnnnnnnnnnnnnnnnnnnnnnnnnnnnnnnnnnnnnnnnnnnnnnnnnnnnnnnnnnnnnnnnnnnnnnnnnnnnnnnnnnnnnnnnnnnnnnnnnnnnnnnnnnnnnnnnnnnnnnnnnnnnnnnnnnnnnnnnnnnnnnnnnnnnnnnnnnnnnnnnnnnnnnnnnnnnnnnnnnnnnnnnnnnnnnnnnnnnnnnnnnncttcctttttttctagagcttttagatgtgttgtcaagctgctagtatgtgctctctcccgtttcttcttggaggcactcagagctatgagtttccctcttagaaatgctttcattgtgtcccataggtttgggtacgttgtggcttcattttcattaaactctaaaaagtctttaatttctttctttattccttccttgaccaaggtatcattgagaagagtgttgttcagtttaaggtccctagtccatgttatagtccagaaaagaaggcttgaagctcggactgaaagggctctttgtgcagattctggtcctggagaatgagctatgacttgacactccctcactttctccacagccatgctgtctagaaggtgtaggggacaccctaacttctagcgttttgatgtggagagacttttctgaaaacatcctgcctctctttggtagcactccagagtttttccgaggcccacaggtggctgaaaccccactctgccgtaaatcactacatggaacacttcctgtgtaatttagaaaacagaaaagcaaataccttgtcagctagcaatcagaagcccattctgtcggaaaagcctgccccttgtccctgtccgcctcaacatgccctttcacacaaatcatcctggcaatttatttgcagcagccacacacaactgacgccctcccagtctttcacattacttgatgtcttaaacttcctttcaaatgtttccaaaccaccagagtacctcttcacagactcccattgacgcagtgcggggttgaggttgtgtcaaatataactgatgatcggaatcattcccacctgctccacgttgttgacatccagtgaataaaggcaatgttgttgctcctaccatagagctagtgaagttaggacttggttttgactggagaaattattaccttttgctgggctcttctaagccaatgacttagagcgctcctgccccgtgtttatttattttaataatttttccaccactcccaatgaagtgtaacttttttttattattattgcaacattgatgtgtggcatatgccctaacatggggacagaaatgtatacataaatatcctttcaaggattcgaggaggggaagccactgtcatgtctcctactgccacttctatgtgcagctttgagggtcttattctggcctcgaatggttaagcactaggagatacttcacaataacatgtacgtaggaaagaaccgcatgccgcatttgcattgtgttcacagcaaaagctccatgctcatcctctctcttactgtataaaggagcctgatgcttgggcatctggccatagaagtcactgagcaaaggagagatggaggaatgatgtgtggcctgctggatctggcctcctcctcctcggggagtgtatggtttacttttcttttgaaagacatgttgacttttgagtatttgccaagtaaaacagctaactcgttccacaattcactgaatggcacactaaaggaaggaagagtttgtcagtgctcaccttcagggtcccaacccagatgccacaataagctccgagctgtagctttccctgcaaatttctccctttcgcatttgcatatgatttggaaatggtaatacaatttggagcaagcaaagaggattgaggtggcttcggctcacacagagcacagatgtgacttcatttcccagctgtgagtaattttcctcccaatcagaggtagaactgtgaatagactgagaccttctatgtgagcaggatcccagagcgcttcttcaattcaaagggctatttgtttcactcatccaacagcctcagatggcatgcttttctctctctctctctctctctctctctctctctctctctctctctctctctctctctctctctctctctccctctctctctctctctctctctctctctctctctgccaggctgtgtgctctccaaatagccaaggaaatggcctggaaaagaatatgtctctggacatctgtgtttccatgacctttcaaagatttgaacttaaagatgataccatcccttagtgccccaggcacctagtatcccttacctatggagaaagggcagaactctgagctccagccagcaagacataaaggcagaggtcagcagaaagcttgatagtaagctggcaaaacagacaggcacttgggattcttttaagcagtacgtgtcttgccctcatgttctccctcagtaactacccactcttgctggaggtctcactgactgttctgtgggtgtccttgtgatcctacatggctttgaatatgaccaaggagcttccccatccccacccccttttttttataataacgcccaacacccaactgttctgaaaacacagttctgaagacatgtgcctggcttttagtcagagatcgctgagaacagggagaggaagtcagggggtcgcttttaagaaaaaggaaagagctttcatgttgtgcacacagttgctttcacttttcaattgcttgggaaacactaatttttttctgattcaggtgaatttactgagtaatatgcttttaagccacagtggaccttagaggtgatttttagaactgttggtgcaagtcaggaaaactgaggctcagagaagttcattgacttctttaggttatctctacagtgtcagacaccaaaaacaaaacaaaacaaaaaacaaaaacaacaacaacaacaacaaaaaactatctagcaagccatgagatgtttcctatggggcaagtggaaccgtgttaccagacaaaaactgggaaggttgaacaggtttcgaaaccctgatattctcatatctcagaccagtaggcctttcatctgctcctgatccagttcctgtcctggaacacatgaccacagcatcccacatgaagatagtgaccactagtcaagtagcacagagttctccatgccaatgaggtatctagatgggctggtcaggagggtttagccaataagcttcccttcccagacattccttcctgtaagaggtatttaatctctggtctactcagaataagaggtatgcacacactttccacaataaataataaataaacaatatgggcaagcaaggactgtctctctcatcaagaaccacaatgcgggcaaggctttgttatacagatccacccggtctaagtctctcctcagaagacccctctgccccccggacactgccctctccaagctaagtgagattcctgacccaaccccaggctagtcactggttcccacaggaccccattcagatcccagcctgaactggacatccaggtgtttgggaaccttgcctcctcagcctgtctcatttctcacccaggctagctcccccatcttagactaggtttgtagtgtaacgccttccattttctctgtgcaagtggagttcacacactcaagcagcgagatggaaaatggaaccacagtttcccttttcttaaataaaacacatccatttatttattttgaattgttaattgaacagctactatgtagttgacaggacccaggcactgagaatacaaagaaacaaagatataaacagaaaaacagatatcaaagctctgttcttacttatatataaattctctagtcacttaccagtaaatacatcgatatattctagcagttggttggaaatgcagaattttacaccttaatcgagacctattaaatcaaaataccctttagaccacatcctctggggtctctacacaggttagaatatgtacagaaaattaatttttaaagggaaattagtatgttcagacccacagcactgcaaaaatatgtaaggaaggtagggtacctggagaggaggttggggaggagaatacatggatatgaattagaggagctgggtctatgataacattagagacacattagtacagactgtgagggctctggagccatttgaagcatgtgcactctcactccaagtgagaaggaaggcccaaagagtatgcagagcacatacttgtatgttgtaaatggtgggcaggtacactatggcttctcattttccacatagttgtaaatggtgggcataagtggaacaatgaaagggggtagatacactggcactacagagcacaaaggatgttaggtgaggagaatactgtgatgtcactgtggtctgcaatgggtccattctagcatactcaaatgtcctatgaagaaggaaaatttgggatcacaatccatgtaaaggagaaatttaatttagccacagatagtgctagtagccacagcttctcgggaggtggaggctggaagagctttgcaacacaggcaccccggggcactctgggaaacacagcaagctccatctccaaacctagagcatgtgagaacaagcatttcaaggaggacttattgagatgaaacctctttccaagctacagaacgcagatggactacccagccccacagaagtgtgggcacgtgaagaaggagggtgggaaattcagactgatgggaaaatgaaactgcctgtgactgagctcatcacacattctactcctgcctccacttccactccctgcttcgtggcctggacagtcattgtccttctagcagcccacgcttccacggtgcaaggacaggggcaaggataaattaagagccaggaacgtgcttggaaaattagaagtcacaatgtacctgtgacaactgctgaagttgccttttctgagtggcatcgaaagcagccagctgaagaagctgaaaagggctgtggtattttggtattagggcatcacaacaccaccaagacaagcacagttgttgggatttctagctaactttgtttttctcaagtgctgaagtatttctgagacaggcttagcactgccactctagatagagccaccttttcaataagaggcaaaatgaggggagacaaaaatgtctgggtgtttgcattaactgtgcaagtctcaaactagatctgatgcatatgtttacatatatacaaacagtaactcttattttttcatatatatgtgtgtggtatttcagtgtatatgcatgcttgtgtgtgtgtgttgctttctttgtgtttgggtgcttatatgcatatatgtgtaatatttctgtgtgtatgcatgttcatatgtttatgggtataatgtgtgatactctcctctaaattgaaccatcctggaaggaagttcatcatgggaagtcctcagagctagaggtgcctcgggtgttaagagcacttgctggccttccagaggacctgagttcagttccaactattcacagtgggcagttcacaactgcccataactgcagtaccaggagatctttccttcttgagctgaacatacatagcacacacacgaacacacatgcacacacacacacacacacactcacatgcacacatgtgtgcccataaataaaaacaaaacaaacaaaaaacccagaaagttacaaaaggaaataaggaagtaaacaattcaaacatctcaggaagttactgtcacttgaacaaggcccttgcttcctcacaggcagtgagggctgctgaggagactgtgctatggagctgcctgcatgggcatgtgcttgtggaggtttgaggttgatgtcaagagtttttcttggcaatttttcaccttattcactgaggcagggtctgtcagttgaggctcacgggtcaccaggaaagctgttctcacttggtgtcttgctctggggagcacttctccacattctgagcactggagttacaggtgggccagcactccactcagcatttacatgggatgatctgaactctggtccttctacctgccgcctactggcaagccttcatctgctgcgccttctccctcaccccatagtattttcttcaaggtcttggtttttaaataaaatgatagtattaaaagatgnnnnnnnnnnnnnnnnnnnnnnnnnnnnnnnnnnnnnnnnnnnnnnnnnnnnnnnnnnnnnnnnnnnnnnnnnnnnnnnnnnnnnnnnnnnnnnnnnnnnnnnnnnnnnnnnnnnnnnnnnnnnnnnnnnnnnnnnnnnnnntgaaaagccctatagtttttgaggaaaaagggttttggaaatggagtagttgatatttatttttttccccaaagaagtcttacttcttaggaatacttctgagtgacaacgtggtgttttaaggaatgccaagtagtgagaaggctaagaagaagggcctcactggtggaagagcagactgactacctcatgggacaggagcacacaagaaacccttggctgcctgggctggccagtttgtccaggagagacccaatatctgggctctagagtggtatagagaaggtagtaggtaacttgaggacaagaccatggaagcctttccatgcagtctttcttggatgacactagactcccctgaaagtttctcagcaggagtgcggaatgactcagaatgtgtcatggaagatgagtttggcagctcttggctatgcagtcatgttcagagaggctgtgctaggagagagatcatttgaaaacaaataccatggctgagaaatggggaattaattcttcaactactatatgtgtagtgattgacagggtacaccagcgtaagcaacagtggtatcaaatcatggcacttagactcaggaaaatgaacagaagagtcaaagatgcacacactatgtactcactgataagtggatattagcccaaaacctaggatacccaagatataagatacaatttgctaaacacatgaaactcaagaaaaatgaagactaaagtgtggacactatgcccctccttagaagtgggaacaaaacacccatggaaggagttacagagacaaagtttggagctgagatgaaaggatggaccatgtagagactgccatatccagggatccaccccataatcagcatccaaacgctgacaccattgcatacactagcaagattttattgaaaggacccagatgtagctgtctcttgtgagactatgccggggcctggcaaacacagaagtggatgttcacagtcagctagtggatggatcacagggctcccaatggaggagctagagaaagtacccaaggagctaaagggatctgcaaccctataggtggaacaacattatgaactaaccagtaccccggagctcttgactctagctgcatatgtatcaaaagatggcctagccggccatcactggaaagagaggcccattggacacgcaaactttatatgccccagtgcaggggaacgccagggccaaaaagggggagtgggtgggtaggggagnnnnnnnnnnnnnnnnnnnnnnnnnnnnnnnnnnnnnnnnnnnnnnnnnnnnnnnnnnnnnnnnnnnnnnnnnnnnnnnnnnnnnnnnnnnnnnnnnnnnnnnaaaagggggagtgggtgggtaggggagtgggggtgggtgggtatgggggactttttggatagcattggaaatgtaaatgagctaaatatctaataaaaaatggagaaaaaaaagagtcaaagagtcaaagatggctcagatttgcagacgaaatgaaaacccttggaaaaatctatttgattaaagtgacacactccccacataaggaaacatgatttgtagtaatgtaggcccagaacagagttctccacactattgaggtaactagaggccctgagggcttagtcaataagcttcccttcccagacattccaccttgaagaaggtatttaatctcaggtccactctgagaagttggtacagtaaggtatgcatccattttccaccatgaacagtcagtaaacagtttagaaccatggcctgtctttttcatctaccaccactataggaaccatataggtctttgcctacagatctgcagttgaattctcccatagaaggctcctctgtactcccagacatactaaggacaatcactgctgagacaggctggagctcccctttcctcaggctccaggcaagatgctctccctagcccattggttccagactctgttttctgctgtttcatgactcccagtggtgcctggatatccaagagtcagagaatccacttgttgcctgccttgtcccaggcccagggacccctaaaccagctcgggctttcccacatatcagactgtgctttcccacctccagagtcatgtgccagggcctgtccctacagcccagcacccttggtgctagaagacacaatcactttctgcatttctcctccccacaagggcatgtcctacagtggagtgaacacagactgacataagtaaccagcttattttccaaaagtagtagcactatggtacagccaatgctgatggacattatttcaatactccataaatttaccaatagtttaattttaacttcaaagtaatgcgttgaggaagaatgagaccatcacaatggtgtagatgaagaaaccgtattgtgaagggcgaagagaccagaatcactgttcaagagaaattgatccaaacatggtggccatgcctctaattccagcatctgagaggctaaggaatgtgtgtttgggggaagatcaaggccagtctggcctacatagtgacttcaagattagtctatcctgacctacatagtgagtaccatgctagcctggactacccaataagattctgcttcaaacaacaacaacaacaaaaattacccaaatatgggaaaagaaaacctaggatgaagttgaacaggagagagtcaaatcaaagacactcaacagagttgttttcccttggatcaacaagaaatgatatgttcccatcttaaacattgcatagggtaccatcaaatctttgtcatgtgcctgcatagtcttgaatattaagacaattttcatgctattatttctaatgggtactgtattacttacttttatattactatgataaaatgctgaccaaaagcaacttgggcaagaaaggggcttatttcatcttataagtggcaggtcacactctatcactgagggaagtcaggacaggaactgaaggcaggaactgaaacagaagcaatggaggaacactgattactggcttgctcctctgtgacttgttcagcctgatgtcttgtacaacccaagatgacctgtggaagggtggtactgccctcagtaggctagcctgggccctctttcatcaatcattgatcaagaaattaccctcaaatgagatttccccttctcagatgactgtagcttgtgttaagttgacaaaaaaaaaaacaaaacaaacaaaaacaaaaaaaacaacaacaaaaaaaactatctgatgcaggtcccaatatggtcctgtaatgagtgtttcaatagtgatgtgctaacttaggacatactcactattcagagcccaaaccgcattttagaggcacaccatagttcagaattttctttcatttctgagaatacattcatgtttctacacatggaaaccttataagatttttttttcatcctgacaaaaatatctgccagaaacaactcaaggaatgaaacattagttacagtttctgagtcctatccatgatgggaaggtcataggaggcgtgacagtttatatcatggcccacaggaagcagaggggaaagggaggaaggatacgtgacagggccagagaatgatataagcccaaggatacaaccctactgaccttcttcttcttgttagaggcaagattccaactttcatcacctcgcaataatgccatcatattatgaattcatcgggtcttttattaggtctgagtgcatgctttttatctctaagctccttccttcacatccttacacagagagatgctgcttaatctcctaggagatgctcaacccaatggtctgacaattgagtgaggttaaccatcaaagaaacccagacctctgctgtgaccatctggggaagaattaatagctagatgtattctttgagcaaaagccaaacaagccaaacaactcaatagatcttgctgcaaaaatatatgtatatttagcatatagcagcctatagctgataagccttagatttgagctaaaaatcgccattcatgtgttttagccacttcttatttaagttatgtgtttgtcagaaattattagcaccattgatctttgtgggaagacaaatctatctatttttgagtgagttttcttacaccatagtagatgagctcttcctttgaattcagctatgctcttctgaatattatctctagtcgcggcttgttcctatctctactctgctgtctccagatagcatattttgctatatgtatctgaaaatttataattgtgctttctagttgtcttcagtgaacaactcactggctcaaatggttcactgataaaacaaacgcatgcatttccaggataatagcttggatacttctctgaggaatccagagtgacagactgtcacttcgcagagctttttcatttccctaaacttataataaagccagctcattgtttctttaggctactgagcaccacacaatttatttttgtgctcattctgtcttcttgtggcttgctcttgtgcgcattgaagccctacagccaactctggtatcgtttataaaaataagtaattatggcatcttcagatgtgggtatcatcaaagcactgatctaattgtccatcacacatttggagcaggacttgacttctcataacacctcaggctgagtctgcagaaattcatcctgcatgagtgcttatatcaaatgcataattgtagatagaattcccttctcgttcggagtaggtcacctctatcctgctatggaaaccagtcacatttcacatcttcctcttcgcattgcccatccctaatcctgtgtgtgtcctgaaatataatttccggatttattcttcctgattttattcctgaactcatccatttttgtctttcccaagacattttccagtagcctcactaccagccatttcttttttaaatcctataatgattgttgcttcctaattagtttgcacatcaagagaaacccaggtttaatacttacaaagcttttgttacctttattaaaacaccaaaatctttatcaagtctctcaaagccctgtgtgctccaacctcatttatttctcctgactttctctggatgaaagatgagccattcatcaaatctgcttctcttctgtcttgatttttgtctcttatttcataactcaagttccattttgacaaaccagcctccctggccacctcttatccctacccaccctcctccttccccctgcaccctcctctctgtctccttccctccctccacccctctacctctccttcctcctcctccctttattcctccctcctctctcccagagtaaaagatataccaatccatttagtaattcaatttctgtaacaggatatgagaggtggaacagaaaataacagatactaaaacattgcatccattaagattagaagttcaatgtccattgttaccatagcttttcccatattattagtgaaaataattaaattgaatggaatttcataaaatattagtacctgtattttaccaaaaatcacacataaatttttgttttgctaagttaccattttacaatattatataactgagttgatacagcttcatttattgtacttaagcttaccttaaacttacatcctcttgagttgtttgattttatagttacatattaatcacctgtaggacatatttggaactgaggataagcctgggaaatacacattgactacatgttcgagtgatatctgttgctaggatgtgtccttgatacatctgacaataactgaaaactgtatacttcatacccataactccataaaaaactgggctgaatttttatcagttggattttgttacctaaaattgcaaactgagttccacaggcaagtcagttgtcggtcacagtgcctttataatctgcatgtgttttatactttctcaggacaaaataatcatgatattcaaaagacacactcttacacgtgtgaagcaggcaatttcacagttttgttttggtttctgctgttgtaatgcaggcctttgaaagatttttttctcaccgtttagatttgccggcacagctccagtacagaatggaatcatttcctaagatgccacgagcatttggtacacaaaaatttggttttcagttctattgactactcaattcttcaacaaccattatcttctaaggacagaaagatgactttttcttgtggttcatatatttccacccatacacctcccagaagattttaatgctttaagtctttattcttactgatatgactattgacagtatttgaggtatgggaaaagaatcaacaatgaagtcagaaaagatcaaagtaaatgattccaaaacaccattcctatcaggggccatcataaaatcacctgttatctccaagaagcagctcaccacagaatattcaatgcttttaggggagctttaaagagtgggctcagcttcagcttgagccaaggggttcagtacatgctaggcagatgccctgccacagactacatccccaaaccccagataatacaaatattaagtatattcttccttgcaattatacagctttctgggaacacaagatcagcactcagattatgatatatacatttaatctgtccagaaagttgcctctgtattattttcttatcaatccccatgcagtttccagctaaccaccaacctgtttccaactaccatagcatattttccctttacttaagcttaatataagtgggatcatatattagaatatccgttgtgtctatttctttaaaccagtggttctcaacctgtgggttatggtctcctttggggatcaaatgaccttttcgcatggattgtccaagaccattgggaaacagaggtatttatattatgaatcataacagcagcaaaattacagttgtgaaacaacaagaaaaataatttcatggtcagatcactacaacatgagaaagtgtattaaaggattgtaacattagggcagttgaaaaactattgctgtaaacattataatactgagaatcattgatagcttggatatcagcaactcactgctacatgcagctcttaatatgctataatttacttatcactttaccagtttgtggagctttcagttatttccaatttgagattaatatgaaaaaggtattatggacaagtcattaaatggctatatttcatctcttttaagtaataaacaaggagtcgaagtactggccatagtgttgtgagtatacatttaccaccactaggcacaatggcacaggtctgtcatctcagctactcaagaagccgaggcaagaggattgaaaagttcaagtcctgtctttgctgagttcaacacgaacttcagaccttgcagaagtaaaaaggactgggaagggaattctgtaagcagcgcttaccttgtacacccaaggccgtagattaagtccccagtgacttggtgccttagttaatgttctaatgctgtgaaagagatgctatgaccaagagaacttatagaagaaaatttggtggccttgatcacagtcgcagggtgtaggtttacaaccatcaaggcagggaatatgaaggccggcaaggcatggcactggtcagtagctaagagcttacatactgatctgaattagcttggaaagaattttccaatgctgagagtaacctacgtgctttaattattatccagcagatcttttcagaggtaggctgtccaacacaccaatcactgtcacaccagcacactgttcagcactcacagtcacttattaaacttctttccatttaaaaaccattcccgtgactcagtgtctctttcatgcgacttcaatccagcctaacatcatttaaaagtttctttgtgaaaataatgtgcttttatgaaatagagaaaattggctcaatctttactgctaagaatttctagcctgtcagtggctgattatttggggcagacatggaaattatagtctattctccagctgaaaccttttcagatgcttctgatgaagccctgacacccaaatcgctgctgtaacatttatgataagagcacatgccatatcctccaacacacacatgggcgacaccttatcattacactgagtgtctcacttgctttgtctttgtcacgtttataggaaacacttaaaagccattggagagaaacagagatttataggaaatacaggaaggagcataacccttccaggaaagagttagggtcaggcaggggctagaaaatgtgtctttagagacccaatgctgaaaccataaaagcccaagccctgttccccattgaaagatgtgaaacattccagtttttatggatcaccttgtttggggtattggtacagatagtctgtgagtttatgagaatagctttggtctcagagttggtctggatagctatattcgttactttcctaacggtgtggcaaagcacaaagacaaacacaatttataaaagtgtttaattgggctgatgattttgatggtttagtgtatgtgatgacagagaaaggcatgaatgcagaaaacctgagagcacacatattagcctgcaagttggaggcagacagagctaactgagaatgcctgggattttgaaacctcacagctcatctccagggacataccttcgccagtaaggccacacctcctaatccttcccaaacagtcgcaccagttggagagtaagtattcaaacatgaatcagcaagcattatttgccttcaaactaccacaatgaccttgggtgaaagtaggagagggagagaatctatgtagatagccagaactacctttttcacttcaaagatcaaattataaacttgacacatatgactctttgcctgacccaccactaaagtgttttcaattctattaaggatgtgggtctacacatccttatggttaatggtcagtacagcaagagaagctccaaaggcccattcctccagaaaaccatggataaagcaaacaataacaacaaaacctctgttaactgatgtgctgtcaaacctctgcaaaggatacagaggtctaggcagctacgcatatgctaaatcaagaaaaggtcatttttaacgtaatgggagagctttgtgactatgctcgctattgtttttattgctgtgaacaaatacccaaaatatccagcaagccggcttgtttgagtgcactgtgcaggggatgctgttcatctcaccagaaagctgtgatggtgggaccatctgctgatggccatggacactgattgctcacatcatcacaggagacaatgaggcacagtgttcaatgctatcacccagttggcctttccactttcccctttctgttcaaactgagaccccagaatatgggacggtgccacctacatcctaaacctgtcttttcccttagatgattctctatgattctctctagaaagaccattgtagacagagatgattctctatgattctctctagggagaccattgtagacacagatgattctctatgattctctctagagagaccattgtagacacagatgattctctatgattctctctagggagaccattgtagacacagatgattctctatgattctctctagggagaccattgtagacacagatgattctctatgattctctctagggagaccattgtagacacagatgattctctatgattctctctagggagaccattgtagacacagatgattctctatgattctctctagggagaccattgtagacacagatgattctctatgattctctctagggagaccattgtagacacagatgattctctatgattctctctagaaagaccattgtagacacaccaaaggtgaacctcacaactgttcgttagctgtcggactccggtgcagctgacacatgcgaccatggtgatgttgtcgcttaccctggcctcagtatggcagtgctctcacatacagaagctgtgtgcttagtgaggatacgtagtccggtgcccccacaatgcaggctttattaccaaggaatctttgtccatgttgatgtatttgggctttcttggaggaataacagacgtttcttgactccccactccccagtttagaagtctctgaggcaatacaagctggtatataaattatttctgagaaactttgagagttaaatgaactagccacctagagcaaaagatgacagttggtagaaaaaaaataggcatgcataaatcctgagagaagaggctgaacagagaattgcttcagggataatgattctgaagacacacttccatgtaatgaggcatctacaattatgcagatgtcccaggtaggacagatactttaaaaaaaaagaactctaagcttttccttccatcttaactcacggtgatataacattaggaaatgaaagctcagagagaattttagatacctaggctaagcaacaacaaagtgtccaacacaagacaatctaaaaaggtatgcaaagattgtgtgtgtgtgtgtgtgtgtgtgtgtgtgtgtgtgtgtgtagttagggaagtttaggttaaattactgcatagagttttagatacctatgctatgcaacaacaaagagtccaacacaaggcaatcttaaaaggtgtacaaagggtgtgtgtgtgtgtgtgtgtgtgtgtgtgtgtgtgtgtgtgtggtctgtgtgtgtagttatggaagtttatattaaattactgcatagagctttagatacctatgataagcaacaacaaagagtccaacacaagacaatctaaaaaaaagtgtgcaaagggtttgtgtgtgtgtgtgtgtgtgtgtgtgtgtgtatctgtgtgtctgtgggtgtagttagggaaatttatgttaaattactacctaatctactaacagagcagcagctttagtagcacactgcattaaaatataaccttgaaaaaaacaattgactagaatgaatgaagatatacatacatttctctagtgctggttcactgatgaacaacaaacacaggaaaaggttcacagtattagagaccatggaagatatgtcaatcaaagccagatgaaataccactgcacttagaccaatatggctgtcattttaaaataatactaaaattaactggaagtaccaagatttacttataatgtaaaaagatgagactctttttctccttcgtggcagggatttgaaatgctgcaattgccatggaaaatgatattgtgggtttccaaattttaatccagcaagtatacttctgagaatatatgcccaaataattgaaagcagggactgagacatatttttacttccttttcataaagcgttatttacaatagtcaaaaggtagaaacaaacaaaatttacatcaatggatgcctatatgaatgggatgtgatatgtacaccaaatggaaatttatccacctttaaaaagtaaagaaaattggacacaagttagaaaagtgttagaatttgcagacattttattaaataaaattatccagacaaaaaggatagatacttgtataactctaatgatgtaaaatatgtagagtaaacatacagacagaaaaagacagttgtcaggcactagttagagatgagaataaggtattatttagtgggtgcagaattgagtctgagatgagtacatttggtaaataggtggcagtggtgcttggaaaatacagcagtataattttacttaatgtcatccaactgtattcttacaattgaaaatttgtaacatataggctaataaaaatgtttagaaaaattactaaacaactaactccaccccacagcagacagaaacagcaaacccaagtcatggtgagatggtaactcgacaattaccacataatgttcaggaggtcccattttcaacactagtgaaatgaggcatgaaacaagaaaaatacaactaatctatggaagggaggattatcaggaactctggtgtaggtgagggaaaccatggacaaaggatgaaaggaaactggaaagatgatgtcttcaagaccagctgaattaaactagtccagggatgatgtggtcaaagatcagtctggaaagagccagcacactgtgtagctcaataatagagcatgtgcctagcacacaggaggacctggattcagctcctggccatgaaagtaaatagaagtataagtgttaagatgccagcaggtaaggagatactcatgagacctgctgtgaagctaacaagttctctgacctggttcggtgagaatgttgaaggcacttgcaagtagagtttatttgctcatataactttgatttgcagtctcctacacatcctttgttattttcttttggttatatcactcgtggtaaaggatgagaaagtctcagagagaccagctcaaaacttctactcatgatttacaacttcctctcaccatcagatagagttcagagacaagtgaaaaataaagaattggaggaagtttattccagggagaaactaaggacgtgttcaagaagtgtgtttgggttcctaaaaagagacaccctgcctgggatgctggatagcatcctatcagaaaacttcagtgggagcgagagttatttgtgagttaaagtggggtggtggtggagaattccagaaatgggtcaggatcctcccagaatagagtaattgtgtgtgatttttctggagacgcacactgagaacaggcaattttgtaaggctcaagataggagatgccattacagtgaagcagaggaagccatcagtcctctcagttggtgagactgatcccagctccgttggggcagccttgtgtcttccttgtgtcagtcgtcatgcatgtcctacggtatgagctctgcagtcacatgggcttgtagccattgttcattcacttccttttttcatgatgccagtgtgttctgcctcagttcctgaatatgtccccaagcctagaggaatgaagttacattattattgtctgtcctgaaatcgggtatctttaacttagaatctaattacagtttctgtaattgtattttccagtgaagtgggtatggaaccaaaccgtgggaacatttctgtcacctatgcctctatatcaacagaggcatgaaaatgttctttagttccctacacgaagcatcaagtcctcaccagtgacatcctgaaatatgtcactgcaatatgaagttgcaaatgcaagtgaagtttaaagaatcacattgtttgctaaggttagatgtaaataaaaggattttagactatggtaggctcctggttaccttcccccgatgttcggaaactagctgaaatgtctcaatttacatcaggattaaattttattaacagaaacaattagaaagcacagtttataggctaaatctgctttactctctaagctaataggcttaaagatcaccagtgtaattgactttaaatatattgaagcttacaattaacagtgatctttgctaggggtgatggtgcatatctttgattctagcaatgaagaggcagaggcagaggcaggcagatctctgtgacttgcaggccagccatggctctgcagtgagcccttttctcaaaacaaacaaacaaaagcaaactgtgctgctcttagactaatcaattaaaagcactgtctgctcttaaagagatttgtttctcgatatctattgggcagctcacaagtctttgtaactccagttccagggattccatacacatgaatgcagcactcatacatacaagcaaaacacccatctgcatgcatatatgtgtgtgtgtgtgtgtgtattaaagttgtgttaaaaatagtctttcctataaaaatcaagaacatttactataaatatatcacatgaaatgagaagtcttgtctattgcatcatttgtaagtacaggaaaagttggtatacttgactatattattttctttactggaggaaggtgtacatgtcatggctagcatgtggaggtaagacgacaacttatgggagtccgttctctctttgcagcacaggagtcctggggacctaaatcaagtccatccgttaggcttggcagaaagtgcctttacctgtagagtcatccatacctctattcaagaaagcttcccaggcattacatggaacaatatctagttaaggcagcttgcctttttcctctccagcaggtcttgagtgaagaaagctagaaaggaatgaagggtccttggcaagttcatctatagcctttttcttcaagaaggaagaacatcttagacaagtaacagcctcgaagacctgttcccacgcatcctcctcaaaagcttgagcacacgatgttcctttccagaaatctgataggcttgtgtcaggaggcagttttagcccagagggtctgaaaagctgccccatgatccctaaccacagctgtgcttctgaaagctggcacttcagctctaagcatcgagtgccctgtagggaagagaagcagtggtgtactgctgcactctgggaaaggaaaggaagtgctctaagtgagagcacttttctggaaagcagtgggttaagtgttccttgttaccttggaagcagtaactgggcaaagcaatctcatttgctctggctgcatgctaatggctaatatttatgtaatgcccacataccagaatactctccctaccagaataatggagagtctttccactacacaacaattttatggacctaacattctttcctttttgtagctgagtggtatttttcagaactctttaattttgagattataattatatcatttcctccccttcccttgactccctccaaactctcccatatgcccctccttgctctatttcaaattcttgcgtgttctctctctctctctctctctctctctctctctctctctctctctctctctctctccctcattattaggaatgtatagtgtgtgtgtccataaatttataagtacaacctggtcagtttgtataatgttacttgtatgtgtattttcagagctgatcatccttattggaaaaagaaactgagtaagagcgattgttgtgcttccaacttttcctctgatgcctgtagttctttgtgtatagttgaaggttttggggctttcccagtccacattaacatgccttttggtgttttccttgttaaattcatgtttaggcagtcatgttggtgagaatttagaagtgtagctgctgacattcctaggggacgtcaaactccttgatcttctggatcctgcagtttttctgtcattgttttgtttcatctttcctgagccttaaatgtaggaattgtgttgtagatgtacccactgggaccgggctctgcaactctgcattttggttggttgtggttttatataatggtctccacctattgcaacaagaagtgacattgatgagggatgagaactacgcttatctgtgctttgaaggacaaatattagactgtcattaggggttatcttgttgagtaaagtgatagttgcaggttcttcctctaggtccatgacttctagccctgggtagttggctaggtttctaataattaggcctgattcctctcttaccgagtaaaccttaagtcctattagagagatgttggttacaccatcaagttatgcgtgctacttctacacccttcgggttatcatgccgtgcttggcgttactgtggttcgcaggtgtcaccactgggtaagattaccagtgcatccctcctttagaggcttgcatggaaccttcacgtatcctgaaagctagtcctcagagaggagacatttgtgtcctttccagctcaaggacccctgggctcggtatctgaactgtcttcaacagtagtgacttatcttagacttcggtggggcatgggtggcatttgaaataagtgtagccccagtcacctggaagttcagcttatctgtcagaatgaatttacacgggccattaatagtgcttcattggagtaatttctaaagtagttctaatttcaggctactagcttgggaagcatttgggtgatttactattcctgttccctcagcaagtttaaagccaggaaaactgcatattcaatggatgcctttcagcccttcatctatgaaaatggtattactgaatagtctctaggcaggcatgttttcacctccactaccaacatgaagctgatacttctcggtgcttgtagtatgtaaacccaagagatgtaaacaatgtgggtttatgaagctagccatttaaaagtatctgctgtagggaaaatcttagggtggatgagtagagttaattcacatgtattacaaaaaaaatcagtcattgggctggaaagatgtctaagtagttaagagagcttgcttcccttatagaggacacaaggtcaaaatcaattctcatcacctctgctgggtggctcacaaccacctgtaactacagttttaggggcaaccaacaccttcttctggacttcatgagcatgtgcatgcacacacaagcacacacacacacacacacacttgtatacataaactccaaataacctcttcaaatttgaaaaattaaacccagccacaaaatctgaaacacacaatttgtcctgcctacaagatgcacatgggtaaaagatggagaagaatttgagaaaaggcccaaccagtgtctggcccagtttgagacccattccataagagagagcccagagattccacccctgaaactatgagcctagcataactgtcatcagagagcattcacccagcaactgttggaaattaatgcagagacccacagacaaacattaagtagagctgggggaatcctgcagaagacaggggcagatgattgaaggagccaggggtgtcaaggataccacaagaaaacatacagaatcaactaacgacagaccataggggctcacagactcaaccaccaaccagagaatatagatgggatggatatatatgtaacagtattgcagcagggtctttatgtgggagtcctaaaatgggagcagaggatgcctttaactatactgcctgcctttggatccctttctcccaactgggctgccttgtttagtctcaatagaagaggatgtgtgtagtcttactgcaacttgctatgtcaaagctgattgatatctctgggaggcctccacttttctgagaaggggaggagggatggatgggagaggggagaagagggagagactgggaggacagtagcaagggaaaactggattcgggatgtaaaacaaataaaaaattcaatgaagtaaaattaataattaaagcaaaatcaacagttcaatttttttgcctcattatttgtttgctacatattacataaaggatgacataaatattttaaagctggtactttgaagttttctaagtagcttttttttttaatgccccagctatctgtgattcccaagtactctagctgcctgccatcctacggctattggctcaggagtgcttcctgacatgtgcccctgctgaatgggtgagcacagtctttaaacaccaggaacacctgctttgtgtgccaagggagcatgtggttgaggtctccacccaagttagcttcagcctacgaaagcagtacacacctcctcccaaagttgttcctcataaacagcagacacccccacacctttgcacagagctgggaagcaatgtgtcacaacctcaggaatgtggaagacacttccaaagagcacataaatatgaatgtgatggtgatcactatttacatgttgctaaagaaacgtaacattcctctggctacctttgaagcaggtaattgtcagtggaatgcatctcagttcggcttggttacattggtaatcacagcactgaattccttgagtatacactagtgaatttcttagaaacgcttctggtcatgtggcacaaatgaagtttgcaactggctgccatacagagccacttttctatactacctacacgtggcaaagactgttttcaatgccctggacctcatctgcctgcatacagctgtcctgagaatgtaattcatttctgatactttaacctatacattcatgaaacacaataccaataaagcacaatggctgcagctcttccgcgccacaatactgtatacccttgggttggccagtgctgtttgtacttggtgttccctgcattggtctgtaatagtcaactaattcagaatttccaggtctagagaaaagattccagcacgtccttgaatctgagttggagcagaccatgtcgagctcttccccataaggatgctgctggcagtttgaaccattatatgatactgacctgatgggtaggctcataaaactggagaaatactcacacttccagccagctaaagtgctctggattccctaggcaatgacttaatttctgtgttcctcacttcgagggttagtttttcaagattatttgctacagcttttaatcatttttacagggcctctaatgtgaggaactgtggccagtgggtgcctgtgagaattacgtagattgccttaattggttggagaaacccatccttagtatatgcagtgggggagacccaccctggtgctaccccttttggtagcatcccagatcctcctttctcttcagtggcttctctgtctctgcctctatgtccatttctgtctctcaatgccaacttcatttaccctgttgctgctgctgatttatttgctgatacttgtaccagcttctctgtgcttccagcaaagactaaggacccatggatctccaagaactctccagagttgtcaggttaggacttatgagaaggccagcctcatggactcatcggttgacctctctggcaagaggtagccactcttagatggtttctgtgagattgcttaaggcaatataagatatcatcttatgtattttctatacatctcatatgtatgcttgcatctatatgtttgtatatatctatgtatgtatttatgtatgtatgtaggtaggtaggtttgtatgtatgtgtgtgcatgtatttatgcatgtttgtctgtattcactcattctgttgcttctgtctctctagagaaccagaatattacattgacctggtactctagggaagatggagtgaatctggggacaagtataatagtttgggaaaggcactagagacaaaagaaaagtgaaagagtacagaaatagtgactcttttccacttccccttccaccttcaactcctcccctattattgccatctgtaccctaaattattaagaccctcagatccctgcttcattctcccccgttgagagcagaatgttcccaagttagagctccccggtaacttcgccatgtctattaaggatctaaattgttatgaaaaactttctcctttcaaattgcagaagttttagtgaacatcacacaatgcctttaaaactaattttcactggcatatttaagaaactttgccacagtactgcactttaaaataggatataataatcattatagtacgttcctgttctgcttcaaaacaaccagcgctgaagtgtctatttgaagttgttaaaatttggagacactatttagaagctgtgacttagcaaccaaagctgtgtctttgaagtaaatttatactttaaagggaatttatgattagttcagttttccgatcacacatacacacacacacacacacacacacacacacacacacacacaaattacaagtctgaagaagacaaaagttctgaggtacagtgctctgtgtgtgtgtgtgtgtgtgtgtgcccacatgtacacatagctatgatattgttgaagcaacaagcttcctttgaaaataacttattcttatattattaatttttaaaacaggaggatatattgtgatagtttggatcttaaatgtcccccaaaggcttacaagttaaaagtttgtttccaaaatgatggtagtgttggaaggtggtagcagctttgggagatggggccttgtgaaaggaagataggttattgagagccacgtggcccttggaaggggttgggacacagcttcttcaggtagttcccaatactttctgatgactgtgaagtgagctgccctattcaccactgtgaatatactgtgctttcaggaaaactataaaatgtgaaaatttcttattagtctttggattttatctgtgagattttgtagccaaggttctatttgaactaagggagaaaaatctaacaccagttaccaatgcaggctttcgttaaagaggaatttaatgagagaacccagttattacagcacatgcttctatttaagtatttctctacagcatgatggctaaagcctagggagagaaatttatacttttcaggagttctaagaactctacaggggtgggaattcagtgaacaaacaaagttctagagttcctttataatgaacaaacactctatttttgcttaaaaatcatgaaacattagttatttgcacccattttttgaaagtgttttgtttaaggccagtggccttgatcttacagagaactacctctgtttccagagttctgggattaaaggcatgtgccaccactgccaggctgtgtttgtgagttttataaagtaaactttacttattttgttttgaaatgttttaaacctagagtagggaagatttcaaatgttcagcaaacatttttaggaatctaaccttagtccttagcctacagtcagtctcatttgattggttaaatgatgccttaaagacatatcctggcaaaagacttgaggcataaagggtttgtcttaaagatgaatttaccaagcagcagcttggaaacaggagacaacagagagcaaagaaggaaggcaataggatgttttttaccagaagatctagcatggtgactcactacaaacatcgaatccctttgtctctttgcctcattctaagcaagcactcttctttaatgtcagtttcatgccagcagaagcccaagcattcttgatgacaccaagagtcagaatgaatgcttctgtctcaaccggtagaacacagtcccaatgttcatcctttcaacattcatcaaggccccctcctcattactgggctaaaatctacagctggggcataaaactgaccacaaaataatcagccatcatttgccagagtccagagtcaattctatcccaatctgttcctgatacaagtgaatgagacacagaaatgggtatggaagttctaggttagtccataaatatatgtatataccagtgatttcacatgtgcatacacttgtgtgtagataaagacatatacacaccatcctgagaggaaatgtaaccaaacctctagaagaacagaactggtagaacaggtattaaatgggggtttattagagtgctttacagactgtgttctccttagtccaactatgattgtcaccagatggaaaggccaccagtctgatacttgttcagtccaacaggctggatgtctcaactggtcttcagtccatgttagaatcctcaagaaataggttctaacaccagtgcaggaatgccgcagcagcagaatagatgaacttgctagcaagagtgagggcaagcaggtaaaaagcaatagcttcctttttccatgtcctagaatgtgggatgccaccaaaagcctgatttaggatgagtcttcctacctccagtgatccaatcaatataaaaataaatctatcataggtgtacccaactatttaggttttaggtaagttgaggtgtagtcaagctgacaaccaagattagccatcacagctaccaatcttgtgtgttttttaatttatttactcagttggcacacatttactgaggacctaccttatttcagatagtgttacatgctatttggagcagacatccccgcacacacacacacacacacacacacacacacacacacacacacacannnnnnnnnnnnnnnnnnnnggtaataaaatatgtatatggagacttgagaagttggctaggagagaatgaaaagtcctcgttctcccacttctgtcactcttttgtgacagtgattggctagcatacagaatggaacatatttgtgattgatggctattaccttctttctgcttttcttttttattggatattttctttatttacatttcaaatgttataccctttcccagtttcccaccctcctggaaacaccctatcacatcctctgtccccctgcttctatgagggtgttcctccacccacccacccactcccacttcccaacatgcatttctctacactgaggcatctatcaaggtttcataagaccaaggacctttccttccattgatgcatgacaaggctgtcctctgctatgtttgcagctggggccatgtgtactcctttgttgatgtcttagtccctgggagttctgggggagtcttgttagttgatattgttgttcttcctgtggggttgcaaaccccttcaactctttcagtcccttctctagttcccctattagggactccacacttagtccaatggttggctgctaacatctgcctctgtatttgcagggcctctcaggagacagctatatcaggctcctttcagcatgcacatcttggcatccacaatagtgtctgggtttggtaactgtatatgtgatgaatctttaggtgggacagactctgggtggcttttcctttagtctctgctctacactttatctccatatttgctcctgctctgattcaaatggaaagctcagcccttagcctcaagatctctctctgccagatctcttaagcaatgctaatcgaagaatctgcactgaactattgtgcatggagaaagcatgtgtgtacacaatgcacacaatcctacccccatgctaccttatgggcatcaggcttgagaagtaaaatactagttcaaatatcaaattcttaggaatcttaagacagtatctacagaaccttcagtctggtctgattccttctgcatttgtacaagtctctgcttgtgaaactaacactgcataacatgaaaatatttaagaagtaggtaccgatgtcgagagaattagattatattatcctggcgatcttacaaattaaaaatgatgaagaaaaataagataaaagaggatatggttgagcaatcaagtatggtgggaacgggaaagagttgggtggggatgtaactgattgagctgtcacctagcacatgcctggcccgacgttcaacacccagggttgaaagaaaaaaaatggagagaggaaaagagggaagaagaaaggaggagggagggaaagagagagggaagaagggagagagagagagggaagaaaaagagagggagaaaagtgaagttgatcttatggagatcatcagtgtccttcataaaggaagtctctgtgaagaacagccacagacattctctggcaagcatgttcacatgcatatcctcacagacaaggtttccttacttgaacagtaaggaaagggacagcaagggtggcatttttttaaagaaccactggtgagaaaaatgaagatcctcaggacagaattggcagagggtgttctatcaaagatggacagtgatgactgtggcattgggtcatctctgcgatgagtgggattctgccacaggtgcttttgatcagtttagatcttttcccagttttggatatctgtctgtcttccagcgttctgcctactttctccctcattaacagtgagaacagagaacagtcagagttattcacacttgtgtgtgtgtgtgtgtgtgtgtgtgtgtgtgtgtgtgtgtgttggggtggggggatttcacccataccatctttctgacccatctgcaaagagcccaagttctaactaaccatgattcacttttgtcttggctcaccaaaatttactctaagctttcaaaggcataaaatccttccccatttcctttactgtctttctcagaccagggctcctgagtattgatgggtgattacagtagtagtttcttttcatggctttctgtctgtgatccagtgagaataaaacaaaaaggcaggaatcccaggcctccctgaatctgttatttcaggataattgaacatttatgtttcttcggttagtggctaatggacttatccggtggacaaaaggaaactataagatgaatgcagatctctgagaggttccactcaggctctctttaaaagtctgattcatgtttgatgcttttaatcggatctcggaaggttccagtaatcagtttcctcaacaaaagacaaaatgtcagggccagaatagtctgttgtaaatgccaagattgagattacaatataaaaagaacatggaagtttaaaattgatcagaaaccaaaacagctgtggtaggtgtatgattcttaatcattttttttttcctaacagaaatcagtaatgagagtaattttagttcaggttgttcagatgttggtcaaaaattgaagacttgagtcagagtagtttctttttggagttagcatgataccatcatgggcagaaaatcgcacaaggaagaaatgtagtcaacaaagactatattgtcaagccacttacttcgtgggcagccagagccaatgtactggaaactaagaggcatgatcaatgtctctgtctgaagtggcatggctaaggactgtctgttggattcattaactcagtggcacttccagcatgagatgtattaagcagactctggacacagaaaaatgattccaaccagaaagatacaaagactgggagttagaagcctaacacaagacaatgataaagatagagagatgaccagaaaacatagagcatggggaggagtttggccagggttagagcacacagtagtggttgggttcaggcttctctagaacatgtctaggatgctaacccacacagggatttctcacatgccacgttggagatatccatctagtggaatgcattggtgaaattacccagatatagagctatggtgacattaggtgaccaattcaaggatatacagattcaatagggaaattagacctcttaggggtttcaagaacattactaaaattggttagatgtttacacagaaagaacatagctctcttaatgctggagtgcagcttttcacaatggaactaagttgatatcaccaagaactcaacagctttgccatagcagattattatgtctactgaatatgtgtgtatacatggactccatgtggcttctatgtttactttcttggcttagcatagactgaacaataggagtgatgaaagtcccttgagctagatccagtataggcagaaacctctcagcagacaaatcccctttgatgaacaggttcaactctctgcatgtagtgaaactctggcttcccaaaactccacagagtgtcaccgagggctttccttgatgtgagtttcctgtgtggtaaggctgagtaatgttaaagtgaagctctgagagcttcttgatttcatttcacaagagagctgtgtgctccacatccgttcagagacagtagtcattgctgtttgctgtgttgctttacttcacaacaagagtaagctcagaggttcacctcaagagacattgggagactaatggatgagtgggtcagaaacaagatctcctgcctcatcaagagcctccagtcttcaaatagctgcatcttacttaagtcctgatttccacagactctaaggtacaataaaaacatggcagtcaaagtgagtggcaaattagttgacacagatttgcatgtgtttaaattaagtgcaatgagcacctttaaaattgtaatttcttctttaattttgtaaatgacccctcagttggccaatgtccaaccataattggaagtaatgttaaggcaactggtgagcccttctgcctaatgttcaggcaggtagcctttgctgcaagagcacttagcctgccttcattttctcataaagaaatatctggagagcactgggactggcccctactagcaacaatgcaaagagaagagcctgaccttgttattgataggattcctctgctctgtaatgagcgaacttcagagcagtgagcatgacaccaaggaggagcaacgcatcctgccctcagccatgcctgcttctatgcagcaaaagtcttgaaggaaacatctcacatggatatatattgaggcaaaatttccagaaaattatttaaatatataatttacagtttttatttacatggatacatatatagtgtatcatatatgtcatatacataggccttcatatacagttgctaacaaatgcaagctcatttaaggtatatttgtgaacatatgtatatctaaagaaaatataatttggctcttatcaacccctccctatagcaaattacttttctatcatttctccctctaagggtatattttaaagtattaatttgtcattctattttttctaaattaaaataaactataagattgtgtttctgccatctttattttcgtgtttattttaacctaaaaattaatgattgccatatagtaatacatgaatgacctacatttctatgaatttttctgaggttgtgtgtgacagagaaagcagcttacacataaaataagagcaaaccacacatagcatacaagaggaaaactagagactttatcttaattccttggtcctgagttgtagcaagaatagaaccatagcagaggagctggaggtgaagaaacaaacgctttatgataaacaatgttaataaaataacagtaatgaaatcacctattatttgtagacataaaacacatactttaaagagtcttaagtataatcaatcctgtggaattataattcagtttacattttcttcactgactttttaactgaagcaatattagctggcaagggtaaaaagaatagcaggcctttagcattcccttgtgttatacatcttacttttggatcatgagcctcttacctcagcactccatgacagctggcattttcaaagaatagttagcataagaagctaaaggtaagtgcatgaaaccaacccatgggattccttctggctaattattagattgccaatggcttttaagacttttcccttggtctttcttgttttattttgttttcgatgttgagatgccatggactgttacagcgtttagtacttggattgtttgacctatttgtccctatctctgtacaagattctcacaataaacctgcctgtagatgtgggctccagaacctccatccttgtccacatgtctttaaaatctacccagaagctaataaacttgaccccttaggtctacaaggacctcatccatctctctcttccaaaaatcacaatctcataatcttcacttttgttagcttttataatttatttttgcttgtgctcatttctgtcttactgattaatacctcagttagggccaaggtccgggcaaacatgcacacatatcacgaacaccacccgagcggttattatgtgctgcatttgccattgatacgtttgttgaatgagctggctttctttggatgctcatgagacagccgcttgtgtataattcatctgagcagaggagttggagtggcatttcagtgtgtgcagaccgtagatcttcagagctgaatggctctaggcctggtgaagcacaatgactaaacaaacaaaactgttgatccataaacataaaataaaagataaactctgctgcagaagagtgggacagccagaatcagtgcagactgctgcaaaaaataaaaataagaacagtaacaagaagttataatagagatcccaccatgagctgaatatactgaagacaaagttttataaaaaaggattcaaaccaatactatttaaagaattatacaaaataaagaaattacattaaattatttcatagaaaagtctcgctgcccacccactccctagtaatttccttggcctttttatgtactgtgtatttcctcttggttgcttaccactcaagatgattagcgcagaaatccatcacaacctggacccctgcaaatacgtcacagttatcagcacttccattagaacttgtatgaatgatttcatttctgctttaagcctaccatgcgtaacaactaaatagatcaataagaacgagattcatacacagacctgaggaagtttcttatagcagttgattttgatagaaatacatatcaactcagcagaaattacttaataaatctaagtctcaattctcaagcataatggcaatgacagcatattaatctcatgtttgcggagcacttcttttctgtgaggcatgtttgctgacatttacttttgtggaagattgattacagtatggcccccaattcttcatcactaccacttcctggtattcttgccctaagacatgaagcctaatatcttccttccattgaactcagccatgtgactcatactacaaatgagatgttggggagaagagacacccacaatgatataaaattgcttgtgcagttggacttatccattagatgacactgtcacacagacagtatgtccattctagcctgccagatagggaaagtgtgaggcagaactaagtgcacttgtacagccgaagccacttcaatgaaggaatggcaaatctgtccccatgtatgtgagaaggctcaatctatactagcaggaccgtgaagctaactcacaaaagtacaagctaactgttacttattgttgtcaaatagcatgagttgaaactgtttggtacatggtattaatgaaccaattcctggatgatagaccttgatttctaaacacttaagttaaactgttttttgtgcctcacaagtgcaaaagcccaagggtcacaagtggcaagtccttgaatatgctcatgatgtattcttaggatgtgatttcaaattatttttttaaatcattggatttattttgctacaaaatgctgacgatcttttagccactttctttctctctttctttctttctctttctttctttctttctttctttctttctttctttcttccttccttccttccttccttcctttctttctttctttctttctttctttctttctttctttctttcttttccatatcatgtgccaggaaaccccagtttcagagtacaagttggcacattcaaactctagaactcttctttgaaagaagctgagacttgtctccagctgaaactgaatccttagctcttcgccttttcaaacattcattttgtgttccctatatgtttcctctgggtgcctgactcaagaattgaatgttttaaggatcttcatttaggcttggcttctagcaacctgacttaatattcccagctcaggagaatagttatggaatgtagagtctccagaatgtatttcccatacaaaagaaaactgctctcagaactttgtcatctgcatgctttgaacaaggcatagccccttgattcctctgcttaccggactagcttcatctgactgtctccattccttttgcatgccttgaaaatgatttcaagagaatttttcaattttgcattctgaactttggatcagcctttatctagctaagtaaggaaaggagaaatgaaattccagtgtattagcatggcatttaaggtgcagagacttagaagcagtaggcagccatgtggagcatccatttatggctgaattataccattgtagctacttaacatgctgaaccactcttctctgtctggaaaaatcataaaaaggggcccatcagcactctgagtcaccgctaagaagcttatgcgtcctcacacctgcatttaaatgagtatttccggggcgaaaacaaggaccttagagaaattaaatgaaacactttagcggtggaaaacaatattggttcacatctgcatttgtaaattaactccagaaagaactcgtccagttagtttaatcattaatagcagcgattttgaacaacttcttattcttaaaggagggaagattatttaggaaggctcatcacctattaccaaaatataaaatgccagagaacagagctagtaaagcacattgcatctcacagcgggtagcatcctgtggtgacactgggtgactaactcacaacaagcataggattcaaattgggatgctgcagtaaaagagcacctttgatttctcttttcccattacttacttcctgctgcagcatagctgacagagaacagtgtgcctgccctatgtgtgtaccttcattaacgtacccatgtacacatacctgttgccattcatattggaacagaatatccagtcctccagcaggctgccttgattacttgatcattgcaaccatcactaagtttcatcacagtcagtactgaatattgcttgtggctctgaaagaactagttccctaaggattagtgagagaaatctagtcacggtgtcctattctcttttctggccactttaaagcaccatgatcctaagaaattggtctttttctgcttagaagaccttgcactgcactgttagctgccaggtactcacgttgctgaagcagggttctcagcaagctctttttgacttttctggctttctggactcaaatgctccccaggtttagccctactgttctggtgcatgtctccatgcatattctaaggtaaaacttggtctttacaggtgtttcttagctgccagagataagaccttctctgtgcacatcctagagcttgggccaccctactgaccgtcacaaggcctttctcgtagctattcatagctcataagatcttatagtgaagcttaacctcctagatctatctcttctcagttgtttcagataatacatgcatcttgcatgagtctgtagtgcttttactgcaagaccatgtaacatgttcttcactgacaaatgtttcctgtgttcggtcatattatttcttattaactactaaattttgtgggaggagatataagtcaatcaggaaaatactggtttccaaagtatgaggaaccaagctcagatccctaacacccatattgaaaacaaacaaacaaacaaacaaacaggtcatgtgcttataatcttaatggagaagaagagagcagaggcttttcagagctcccaggctaatgagtcttgccaaactagtgagctctggaattaggaagaaaccctgcttcaaaaaagaaagggtagagccataaggaaagcccccaatattaacccattaacctctagactccacatacaccagcacacatgtgccaaaaacatgaaaattcacacacacacacacacacacacacacacacacacacacacacacgcgcgcgcgcgcgcgcacacacactcagaatcaatctaaagaactatcaacgtcttgtaccaccacacccggctttgactgcttctctttttctttcaagtctcagtccagttgtcatattgcagaatcctaaattcacctagctgccacattctgcactttctctgatttcagtctgtcttggtttagctgttttctagggatacaggggttgtaccaaaggccttgcccatgcttcttcttcttcttcttctccttcttcttctttcttcttcttcttcttcttcttcttcttcttcttcttcttcttcttcttcttcttcttcttcttcttcttcttcttcttcttcttcttcttcttcttttttttttcctggtgaattacaactttaaccccagtatgcttcttcagtactcctcgtgttttctagatttgaggcatccctactctttgtcaacttgtagtccaactaccaaaccttttctaaattcacctggagatgctgtcttctctctaggagagcttatcatttcctctgcacacaaagttaatagttccttcttaatcctccaaaggttgttcatgtttctggtttactgttgagttgtgaaaactctttgaggagaattttctctcatttcaaattaatgccgtagattcattacatgtgcactgaatgaccacatgcaatcctcaggggatgtgggatactcccagctaaaggctaggcagcttgagaaattgacatacctttggatggcaatggatgtatgtctctcattccaaaatccagttagcatttgagttttatgctttaggtatgtagcagagttacccttttaggaaggagatcattggcactgtgaagtggtttctttgcttcttctgaaatctcttcattttgcctaactcaatgtcattgttgtgggtctgtttaccagcatcataatatggcttctttccagggacaattttcacaaggaaacaatattgttcagggatgatagcagagttgtcatcaacacaggaagtgggaaaaatacatttgcatttaaaagtggatgcaggaggtatgatgtagatttatccattgggtttgggttccaatctcctgttggtttctgctttgtatccggttgtggttttctctgatgggttccatttgctataaagacagatctcttggatgagaggtggttgctacatttatctgtgggtatagggatgagatttagaacataaggagaattatagtatcctagtaaagtgacagtagtagagtgttggctagattttcagttccgagcaggatcttccttcctcctgttgagtgggtttcaagtccaacttgacagctattggttagtgccaaaacgtgtcacttgtttagagcacttttagggaagccttttcatactggcattgtcatgatctataggtgtagcagctgggtatgactatcgtttgtctcccttgtcagcttccttagtatttttctggttccatgaaaactagatcacagcaagaaggctttcaaggtcatatcctgctcaaatcatccaagttatgagttgtacaaatttagtgatttcagtattaaggacctaccctcaacacctggttggcagctgaaggccacatcaatagtctatattattttgggagtcatttggtctgtcttgaccaacaagcattcaaaaagatgaacctgatgctttgtactagaggttttgtgggtctatgatttttataagaatattgtcaacctaagtggtacaacttctactttacagatgtataaaatagaactattctttgaggatttatcaaataaacttggcattagctatctctaatcccacctaccctctgggtagaaatattttaagaaccagaataccaggaattctgctgtgaaacaatctctcctagtaatggctgcacaagcaagactggaacagtggcagtatcaatggacatgcaaatgtggaagaggaaaatttttacaggatctcacctgtagacaaataaactatagacaacttatgatttctgggagacggagaatcagcttttcccaggcgtgagttccaccattggttagccaagtagagtgttcagccctgaaactatatacatataaacaacaaaaatggactcagaaggttttatttatatatttctgcatatacatatatctacatatgtacatatgtagcaataataatcaaaggaaaaaatagtctagtaacatgagggggggcgtgggagaattttgagggagcaaatggagagagaaagagatataaagacagattttttggatgagagaaactgtctatttcagttaaaaataagtttttaaaaacttaactgaaaaaaacgaaataaatgaatgtatacaaattaaaagaagatgcaaagttgaggatgtagctgagtgttcaaacccttgcctagcactgtcaagatcctggatttgatacttagcaaaaagtaagttaattaggtccttaccgtccttctcctcttccttctcttcctcctcttcttcctcctcctcctcatcattatgattagtattatttactactgctactgattctgctactgctattactactactactactactactactactactactactactactatcactactactgctgctgctattgagacaaggtttgtctgtagtccacgttgtccttgaactcaatatgaactttaaaatcctgaccatcctgtctctacctcccaaatgttgacattataggcatggtccaccctacctggcattaataaatatattttttaaagctgatactgggctggtggcaggacaggctttctaattaccctactccgtcaatattggtcagtctttatagaggacagagatcttcacactgataaatcaaaatgccctaagctttagtgtcactcaccaatgcaataaacaaagccaactgagaatattaaattttaatttcaaactatataattcagtagtagagtatttactgagtatacacaggctcctcaatttgaaccctggcagcacattaaacacacacacacacaatctcctttcttatattttccaaaattcatttccatataaatcatatcaaggatatttagattcccataagtggacaggtagctgctgctgagcctgatgacctacatttgatcccatctcccacatggcagaagtaggaaggaacaacctctgcaagttctctaatttttacatatgtatcatggtgtgtgtgtgtgtgtggtgtgtcctagccctcacagcatctaaacattaaataaatgaatgaataaacaaacaaataaataaaatttaaaggagtccactcacttgtgtttagaatcccaaatttcaactccaaaatccagaattaatgtattaattcaataatataagttacaaaatctggggtctggtgctagttcgtttctgacagtttagcatacgctaaagacacttggaaagacagaaccgtgattaaggaattgcctccattctttggatcatttttttgattaatgattggggtgggaaggcacagcccactgaatgttgtgccatcccaggtaggtggccatgggtgggataagaaagcaaactgagcaagccagagtgagcaatctcagaagcagagctcctgtgtggtcgctgcttcagctcctgccttgacttttctcaatgggactatgacctggggaaattcattgagataccagttcctagcctcagctatatttttatttctctgtatagggtatagaacttggatccaagttatataatagtattcttataaaatgttcaggcctcaaaataccttttagtagatctaagctttttccctaatagaattaaatcagtaaaattgtgccaaaatttttaagatcagagaattatctttcttcttcttcttttttttttttttttttttttttttttttgttactcttaagactgatgccagagctatcaaatataacggctgagtaagagttcacaaagggaggatggtgaatcttcttagctttttactgcaccaacagggaattctctcaggatttctactaaatgagttgggttattattaattagtaggaattaaaacaattatcagatcatgtacaacactgttcttaatgtagcctgcctagggaccatctcaggaagagagggtggcagtttgactccttgctttcttataataataataccgtaactgtacaggcaagggggattctgctaggaggtgggccaccctatccaaagtgagcaaagtgagagcatcatagggaagctaagaggataacaccagttcaagataccacaggtcgagttcctctttctctttcctcctatccctcctttttatcttccttccctctttccaccttcccgtattccttccctccctgcttgcctgccctcttttctcttgtttctttcctcctgtttccttcattgttctagtgtctatttttttttctatctccagagagcccatattcattacggcataggagtaaacagcctcttcagtcactgcgttctaatctcaagccatcttccctgggaatctattttcaaagcgaaagttcagtgttccttgtctgaaatgcttggaggcagattttcagaggtgctttcatttgtttccttctttatttttaacaagagaacagactttactagtggaatatgtctaatccagaaacagaagacccaacgtgctgtgttcatatttgggaatgtttcaaagttttgagccaggcatgctcaaactgcagcacagagtaacagtgcagaaatgtcacagggggtcgggggaggggtctaggtgcatgtataaataaaaatcatgacacctgtagaaagcaagtcagaactctaagttctaattttcccaagatggatgcccatagacaagttattgaacatgtcctacctgtttgcagttaacagtgtaagtcagagtggtgggtgaggtgatttcttctgcttctccaaattttcaaattaatgatctcacttaatctcccaccacatatccagccaagtctgtcctagattatcatgtatttgaaatgtctgtctgttgctgaagtgaataatcacaactattggttactgtaaaaaattaattacagaagctgtaactcagtacacacttattggttttgcacagcaagcaagatctctgccaggagttatgggcacatttaaatctatttacatatatctagaataatttaggtaagaagtaaaaggaatagtaatcaaaattattttgaggaagtttagagcatcttgctataacctgataatccctctacagtggtctgccatgggtagatggttagttttaagttttccttggcttttataatttctaaatgagttgatatatcactagctcttagcatagagtcttggccctactccatgggaaaaaaatagcaaatactattatcatattatttgagtgaccagaaagttgtatataatgaactgtttttctgtcactagatccaacacatattatatgctgacaagatagtatctgcctgtaaagagtacacctcctaagttaaaggtgaacaagcaaatgcttttaaagaatatgttcttccagggtccattctcatgtagtacctatgatacacatgttaagtgtacaagcaatcagaaaataatgtctctttaatgcctgtggggtgagcacagccatacagcctggctctctacttagggcagagatgaatgttaattgtacctttagaagtcaatttcctctactttaacttctaaattgctctaatgacaaaatggtgagcatgccaattaaagctctttggatctcagttttctcttatcatagaagatcagcctattttgctaatttattggtgtgctttactttgcattaagctaaactcaagtggtactgggtagataacagctccctggtggtttctgtctcttgacttttggagcctggtgatgtgttaggttgcatggtgaataggtatgatggttgcagatgaaattaaggacagtgataagatgactttaaaattgggtcaataacctcaaaggacatagtttggatctagagtgtccccctaaaaatgcccatatgttgaaaatttcgtctctagacttctgctattgggaagaggtagaaaatttaagaggtggaacctaataaagggtcattaggtcactagtatctcttcccttgtctccctgtccctgtctctctccctctccctgttcttgtctatctctttgttcctcccacttttcctggccatctccctcctttccttctcatgaagtcaacagtttgattttccatacacagccaacataatgtactgtatcataaccagtccaaaaggtcgtaaaattaccatggactgagaacatggaagcatgagccaaatcttaacaaactggattttgccagtgggccaaatgtaatgacaatgtttatgaaagcagaagatggatcaggagacagtgatgtaagaaggagaaggactgggctcaatgtctctgcctttcaaggtggaaggaaggagcttacagtccaacctgtgctggccacctctaaaacctggagaaggaaaaggcacccatttccccctgaggcatccagaaagcttccaagtcagacctcagacccatgaaactggaaggtattacgtatgtgttgttttaagccactaagtgtgggatttgtaatgcagcaatagaaatggtaaactgaaataaaatataaaaggtctatatcagttctatcttctactgggctaaatttacttgttgtataattaaatacaaaaggagcccaaaataactcaactaatattgcgtgcatattttacatttaaatgatgagctgtaaacaaagaagaattcgttccagagatgtgacttaagacttcataacagccagggtatttcttggtaatttgtgaagacaaaaatgggattctttaaaactacctcagctcagctcctactgggtcttcttcaggtatcctgtttgggcttccttttctgtacttttattacagtactgaaatcatccatttatgtgataatacaatgaacaaagcacttgtgtcccctcaaattctatttgtttgaactctaacctccatttgggaaatgattctcatgaaaggacttataaattggattaacatatgaaagacaacacagagccctccttcacacttttcaccgtgcaaggactgatatacactctacctagatcttggaatttccagcctccagagtgctagataatctattgcttataagcaactacttcctgaatgctctaagacattgatcatttcctataatatgttgagcttctctgtcaagttaaaaggcaaactgaggcacatggactgagagaacaaacactttgttttagttacaactgagataaaacacaaattctagtcacttcaaataagtgcccagtgtctgaggcatctagaggggactaaggagctggctcagtaaaccaagtgtttcctgtataagtatgaggacctgagttcaaagcctggaacccaagtaaagggaaaaggagaaggtggtgggaaggagaaggaaaaagaaacaaaaaagaaaagaaattcccctatgtttattcaaatttcttttataaaaattcttaaaatagtcaactaaaatgccactaagccttcctttggatatcaatttggctgattggttaagtcctttaaataaactcggtctgctatttctgtaattagattgtagaccttagggcataaccttgtaagtaaaagggtaaagcatgttttctggaagggcttgacctgatggagtagtttgggaaggcctattcagtgctttctcaagctttcgctttaatttattagaaatttcagttatacggagtcccgtgagaagggttatggtctgtagatctctatagaaggctaaatctggatattcttgttgtttttgttgccctaaaatattctcccttttgaaagaaggaagtgagttttaaagaagttcccacagtgccaagccatgtgatgtacacctgtagtcatagctgtttgggagactgagactgaaggttctcctacttctgcctactttaagataatcccaggccacacagcagacccatagaagagggaaggaggaagtagagggcagaatatgggtgaatatgtattgtagataggataaaccaaaagaagtaagagcttataagacagtttttcaatctgtgggttcagactctattgcagggtatgatgaccctttcacagggatttcctaagactataagaaaacagatatttacattatgattcataatagtagcaagttacagttatgaaatagcaacaaaaataattttatggttggggggtagccacagcatggggaaatgtattaaagggccacttcattagaaggttgagaaccattgtgctaagagatctggggatatcagaaaatcctcactcgttagatgttttctgtgttgcaaggaagtggataatctattgtttgtggtatcaggagttaaacacacattttgagacatactgggcaagcgctgttcccagctcctagtctgaaaaggggtaattgaaagggatagagtccagccaatctgaaccagagccaaggactgcgttgtagtaacagacctttcaatttcttcttaggtgttggtaaggaacaaaaggcctcctgggaagcctcagaccagccctatggaagttaagtgcattgccttggggaaaccccagcgttctgtaaagtctgcctgagtttccaggctcttatagggaaattcaagtcaactctcagcagtggcagtgttgaatcctaactgccacagagcatagtagggtctcatcttggagtgcaaatccaaaataaaataacaaaggtatagtagagacagacttaatattcatagcagggaaggagaccttgtcagttatttctgaatcaattcccttcttaaaccaaagaaccatcaggaattactcaggaggcacttatgtgtccatggagggagcattcatgagcatgctgtttatgcttctaatttatgatggtgatatagtaggcaggtttgtgtggaggtgtgcctaccttacatgaagcaactgttttaaagttttaagtgatggacaaaattgtatgtgggcatgctcagcttctatcatgaagtttaacctgaaaaccaaggcaaggacggtttgaatgtgtgcacacactagaaattaccctggaggtgcctgcctcgggctgcagtggtagtggaaacaatcaagcagaaaaaaattttaaaaagtaagtttggaacttagtcctcaaatcatctctgttgatttttctccatatactgtttacaaggaggcgacttttatttctgagctgtatttagaaggtttaaaatatattttagaaaacgatctttgcattctgttttttatttaaattagatctttttccaacccagagtagaaatataccaattttggagtttaaaaaaaattcatttttgtcactggcatttaataatgtccttaaacgaagtcatgttgctaggcacaaggcaggttagatgccacaagtaggaaccatggagccagctggagtgtgaggatgtctttgcgtccaagaagggaagcaaaaggctgtgagaagcaatttgccacaatttagattcctctgctaagtgaccaggtctggcctcaggggaagtcaagcacgcacttgtgtggttactcctctgtgctttgctccctggtccatttagctcatatatgcgtctcagaaccctgattgtcttaccggaagttggctgacccaggtgctttgatgggctcctggctgaggtgaaagttccctaaaacagtcttctagtgggagtccccatgggaccactacaggttatggaccaatgcctgggcacttccagtaatgctctcagtaatgagagcatcatttcataccccagaggtcagacaaagagggttggtcccattgagagataaatcagcgtcacaaaacaaaagcaaacaaaagaagccatgccttacagcgcacataaccggttgttgctagttgaagcaaggtcactgcagtgagaggactgtgtcctgactctggaaaccttatgagaatgcacatctttatcctctccaaaagaagccagaaaaaggtgtctataccatgcagatgctagtctgctcctcatatacacagagaaggtttgccaacagttcagaataaagtccagctttggccaaagaccttggagacttgaagtccagagagaccagcctaggctgagcttgtgggatcagaaaacacagtagtaacatgccctggtcaagatctgtcaggagcagcctgtgagggaacaagaaggctgctaagagacctgccaccttacccaggaatgtcaacctaaaaggcaagttggggcacactcaccaagagaacagaaaattgcttaaagctaaaaggaagattggccatccagagaggaaacacaaatgttaacctttcagaattagtacttccgagatcacaaagagtgaggcttttctaagttaaagggaaaagcaggagagaccacaggaaggccatggagatccactctttgcagttgtgttaatccacaaaagcagctgagggccttggagggccatgtgtcccctgtgctggaacctttgagtatgagttgcaataaccaggaaaaggttttggttgtggttttattttattttttgtatttccagggatcaaactcctgtccttgtaaattctaggcattgttctagcctcaagtgataccagatcccccaggaagtatttaacaaacactttgttttctattgtatctttcgggaatcagggaatctgcatctgccatgctgggtcagggtgacctagtgcatgtagtcttatgcctcgtggattctcaaggcatgaattaaaaaaaaaaacattaattctcatgactaaaaaacagtatttattatattttttgtgtatgtgtgatgttcatatgtgcttcactgaacaactttgcgagtcagttcttatcttcctctctgggtcctagggattgaattcaggatgtctggcttgagtggcgagtgctttcactcactgtcctaatgacagttaggcagaaaggcaaaaacaggtggatgctccttcacggagtcctgcctgacccctggatgcagtcctgagtactttcaaaaggcaaaattcaagccatcatgaattttgaggccattcacaagacactaaatgtgggtgggtcttcagacagataccggaggacaaatacatgcaagctttccattttcctgagtggcaagtagtagggtggatcctagtcaccaggaaggccgagaagtggccaaaataatagctcctatctgatccattcaggctggcctaagggcccctggtcagtgcctgaaggaaatgaaatgtctttcctcatgactgcagaggctggaagtgcaaagtcaagatgtcaacagctttttgctttttccagaagcctctcttgctgccatgctttcaaatgactttttctctgtgcacatccttcccactctgtccttcaccttctgatgattgattctactcttcgtggaagaaggctgcatttttaacctgtattatttaaaggtcttatttccaaacacggtcacattaggagttagagcttcaacaagtgaatcagagacagggtggggggaggggcacaatcccattcataacatcaacactgcaaataaaacaacatgagctttggtataacgcacaataaatatttgacaggggggtgattgagagatagggtctcactctgtatcccaggcagtcctggtactcactgtgtggaccagtctaggctagaccttaagaagttcctaccttagtctccggagtattggattactggtgtgtggtgccacaaccatctctttacccggtttctaagctttgtatcaattttaaaactcctgaattttaagttgaacccagtccaacaaactaatcaaaatcccaagggtaggatcgggcagccatttttaagagcttcctgaagattccagtgtgcagccgagcatttttgtgcgatagggtagaaagagcccttagccttctcttcacctttgctcccatttccagccccgtgcttgtccagtgtcttgaatgtgttcacttctacttagaggtttgtgccactaactgaagagtatactttcttcagttttaatatgatccaatgaacatagcacattgttcctcctgaaaacatggtgagtctgattgaggtttagtttgggggcttacttttgggagagtgtggaagactaaagtcatgtaattattttgcattgaggaattttgagaagtttcacatggcttcctggctgtcttaagaaggttctttcgctctgaagaaaatgagacatactgccctcagagcccaggctaggcattcaagctcagtccaggtcatttcagagaatacgtgcccttgcctcggtttggtgtttgccagcactgactgaaaacatggcttcagtgagcaactaattcttcaagaaaatgctgagaggtggccctgaaatcattctggcttgaactcagaaatctggtttctggttttcccaagctgttccacccaccacactccacaccaaggcctacatcagggctttccagacagtcctgtacacacaagccctctggggaccaccatggttctgaataagcctaaggtgagatacctagattccttctgagctctggggatctgatgctacatgtcttctggctcagttccagcattctgagagcagagttctgagggcacagtagattgtccagctcttgtaagagccctttgcagatgtgaattgcaggaatccttcagtatctcttttaggaagcaaagcaatggcactctttagacagcatatcggtgtgagctcagtgccttaaatacgctgtataaatagcacagcagataaatcactgcctttagaaacaaaccattttgctaagtgcatcttgcctccatcagacattaagcacgtatctgattcattcttagatgacagttactctcccaaattaggagcttaaaagggcattccgtaaaggaacacattattgtattaacctttgaattgtcttaaaggttgctcttacattttataatgcatgtaagagcacacgggaactttttaaaagaggcatctgtgaatttttattcaagaataaagatgtgtctgtggatcatctttcaaggctaatataaacctctcagacacaaccctaaagacaaggatttttttaagagcaattaaaacgactatgccaaatacaaggaagaaagaaaagacttgatgagaccaaaaataatctaaaaccataccaaatgaacaaaagaaaaggagaggcaatggggctctttgtttttatcattgcaatgtccaatatgtaagtgtgcaccagagttacaaatgttaacagtgatgtagctcagtgaaggagcacttgcctagcatgcactaggtcctgggtttattctccagtaatagcaatgtcaaaagctaacacttactgcccatgtcctttgttctcagaggtagtgattactgtttagagctgtaagcctgaagtgtgtgcatctgaacccttatgtaaatttgggaatagaaaagcagaacctgactgcatggacatgtctgctctggaaccaaacctgactcgcctaagtggttcatctctatctacaatgcccctgagcagactgttttggtgcccatcaagacacatggttgtggaagagattttacactttggttgatattaaaatcactccgaagcttcttctctcccaacagagcatgctctggaaatgtggtgaagagaagctttcttctgtaaggtcatctgtcccattgctagtccacgtcccatccagcacctccattaccatcaacccctcatgctgtaggcctgggtgactcccacagttcagatacctgaggttcatccaatgtcacttcacacagtggaaacagggcactaccttgtctacctcacataagtaatttattgaggcaaatttgaaaaacttgatcctggtaaataaggtataattgtctactacccataaaaaatatatctacaaaggagagcatttgataccaggttattttttcaaaatcaaacaaaagaaaggttggctcttgccattcccagaatagaggtttgtgtgatagtccttagactgccttgatttaaagcaggtgtatagaatacaaaatggtatttaaagaggtgtcgcgatattaattaaaacgggcttgctgaaatgccatggagatcatcacttctgaaaattgaattagaccctgaatgtcagcgttgaattatcatgaatagacttatctatccctgcccaaatatatttcatccacaaactgtgtaatacatgatgattaaccagaggttacagattcaaactgaaagccaatcagttctccagaatgctaactggggattgttctcaggtcaaagaataggaacagaaaagttcccatcacttaaagggcaagccgagctggtaaagagtattgagaattttgcttttaattgctcctttctgtcagtggcaatgcagagaacttgtgtgcttagcttcctggcttaacttctggcgctgatgacatttgggggcgtggttcaaagccgctgtcttagccaggaaggttccagatcttccttcccaaggcgacatgaagttccccagacaggatgtcaagggaaactcctggtctccttgttttcagagtatctttctttctacattgaaagagtcccaagtgtatacattcagtattcaaatactatgttgtttctgtaacgtcagcatttatagtctattaagagctcccaaaaggacagacaatgaaaggcctgtggtctgtgaaacacaagactcacactgggttacagaccagcccactctagcagtgtgtggcccatcctcgcatctgtcaacttagtaatgctcttgagtttctcttcctttgtcttattcttgataactcattgactcaattcaccaaacacagatccaggcatcacaaatagttcaggaaccaaacgccttgctttcctatgcatccgtctaaatctatggctaagccctgtgtttaaggttttcaaagtggctctgttccaaattcaggttagcatttgcactttgcctgaagggaggctgtgggatgaacttcaaacagctttgtaggtaatttccagctggtgaggtttagcatgatcagctggctcctccggcccctcactttccttgcagatgatggagcccaagacaatcagggcttgtcaacccagctgagtttacatttaaacttaagtgattctcagcatggtctctggatcagcaattgcaacagcatctggaacaataattccctcggcttgctggtattagtcagttttttttgtttgtttgttttggttttttggttttctttttttattttttggtcactaaaatgtagtggaatagtcacagtgtgaacaaaggatttttgagctggaacagaggtcctgaattcaattcccagcaaccacatagtggctcgtaaccatctttaatagtatctgacgccctcttctgggatgtctgtagacagctacagtggactcatacacaaaatataaataaatctttttttaagaaaaacactaatgcatttcataaatagttttacaaattcattttataaaaaagcaacgacaataacaacaaaacaaagcaaatgtgagtccactgacctagtcacatgcccaggcagcagctcaaatattttctgaataaacacacaaactctcaagagtacaaaaatagaaatattagaggtaattatttgggttccaaacaaagttttaattgcagtttctagtatttgactaacttcaatatttatgttaccataataagaggactgcaacaattagtttcctggcctgtgcaatttggaactcttagtcctaaaaatgttttgagatatatcagtgtagattcatcaatgttcaaatactgcttctgaaataaacctggtagtatcttctctctttttttttaacataagcagaagttaaatgccctttaaagtatttcctactgaaataaattataggttattgaaccgaaagtacagttttcttccaatctttgtcctccctctgctcccttgcattcattcccataacaagtagatgagtataataaagttgatgctgtctcctggacaagggcttgctttctgggatttgtattatagcaatccatgtcccaaaggtgatgtagactaggctcaatcatttccatctgtgaggaaggacattggaatgagacggaaagtgtggagatcactccactatgggatgaaatagacaccgtatcttaacagctatagagacttgagaattaaaagccatagagacaattgtcttggttacaaatgatggctgcatcacacctggcagcctctcccttcaaatcaccgctgtcgttaggccaagaaaatcccatcacttcaagatcctggggttcatggacatattgtgaagcaaccctgtcagggtgcatagatttctgaggaccgacattcattgaaacagcagcaaattcacctttgagaagtatgtggttcaatgtcttcagcatggtcagtattttggtactcacttatacaatctataatggtagaatgtttttactactctaaaatgaaattcttcatgccagaacggctaccttcttttctccctagcaactatttaacttccagtctctagaattacactttcaatctagtgatgatggtacatgctggtaagccaagaacttgggaaggagaggcaggaggatcaggaattaaaggctgttttggctacgtggtaaggttggggtcagcctataagagatgtccttaaaagaacaaagattaaaacacggtaaaaatttcatgtaatcatgggatcatgactcatgcggtctttcatgtttggtttcctttacagagcatgctgtttttaggctttctccatggtagcatgtgtcttgctttgttgctttgattgacattagtattccattttgtatttatactgcattttgttccatccatttatcagtgcatggacacttgaattgtttcgctttttctttctttctttatattggagacaggaaatttcactccatgctgatcgtgtagtcctggttagcttcaaactctgggtgattcactaggttgggaagggtaaggcatcatgtctggctgctgcaacctttggctgcttgtcataaagaggcctgttgctgcattttatggaaaagttgttattagcatctaacataggtctctttcttgtggaactatgccaaggaatgaaactgctaggtcatgtgggtgacacctttaccatctcaaggaatttcccactcttctgagggccacaccactacccctttatattctcaccagcattgtgttgacaggcctcttctcagacacaatggacaagtgatttttcccatttggttggttttctgtttcttgagagagccattgctctgcaatgtatttctctatttctggttggcggtctttgcttttattttttgtttcaaacctggagattcttacactgtagacatggtttacctctggactctcttgccagtctactgtgtttacaactaaggaaatcgaatttactacttggttgtcattgctttaactcttagattgtgaaaagaaatggatgtctaattgaaggcctcaaagatttgtattcacagagatgctcaaagtctttacagttttagcctttataaatagattcattgcacattgtgagtgaatttttttttatacagtgtgaggtaggagttaaactttaatgtgaagtttagcttaagaaattgaattttaatatatttaaagtgaaaaaaaacctgaaacaagattaagctaaactaactttacttttatctatccttattgttatttatgagaggcaagaatgaatgaagattaggagagatattggcagctatgtacatgtgtgcactaagctcgttctgaatgtaagtttctattctaatggagaagcccctgtgttctgaagctggaaaagcgcgtgcacctgagaaactaaaatggtatagtagtggttgtcattttatgtaagtcttacttatcaaatacaagaaataattaccgtggcttttgtgatgctaagtatagagattattagaaatttcaaatttaaaataaattaatatctttaacaaagcttagaaagtttcccagtactacattagctttccgccactgagaactacctgaggtagccagtttgcacagtgtaagaaggtacagggctactgttagtcatggcttgcacggctgacgtgacctattagctctgatgcttgggggctgtgataaggcagtaaattctggggacagaagagtggggctgatgtttatctgataggtgtcaggaagactacagagatggggaccgggtctcaaattcccttccaaggcactttctgaatgacctgacttcctttttctaagctccaccccttaaagcgtccaccactctgaacaccacaatctgagaggtacaccttagagatgtcggccattggggtgcattctagatcccagctacagcgagaagcatcatatttaaatacataaagttggctaattagaatagctgattatttgtaaatggtagaaccctctatttcacctttaattgaaaaaaaaaaaaagaaaaagaaaaaagaaaacgtgtgaagccaggcatgctggtgtgtgtttgtaatcacagcactggaaaaacagagtcaaaatgaatcaggaggttaaggccagccttggctacatacagagtcagacaccagctcagaattacataaggccccatctcaagcaaagtaatgaaatttcgagtttcataattctaaaaccatgagactcacttgctttttacttcttgaactcataaaaataaattcttcagcagacctagaatgtttaggagagctgttaatggtgactggaaagaggattttttttccaatatattttatggagttccatggcccgagtggacaggcacattggtgactctgggctgcctggttgcactgcagtggcatctcaaagccaccctcttggctctgttcaaggactcctaagcagtgctcttacatcaagctctttttgttgaaaacacatcagctttcttttcacaccttgtcagctcccatcaacagaaagacatagcaggtgtgtgttcagaaggcagttagagctgtgcctttgcttctgtgggcagatccttagaacctgcaggcaagtctgttgaatgaatgaagaaaagggcacatggagcaggtgagaggaatgtgcttatggtatttgtagagctccagaattcacttgtgagtcagttcttaccgtgaagggcacttcaatgaccattcaaattttttcttgaaattctgtaatgtaaaactcaaaaatagacccagcaagatagctcatcaactaaagtcacttgctggcagaagtcaagcaacccacatttgagccttggaacccaggtataagtggatagagaaagcctgctccatagagctgtccttcgacctccccctgtacactgtagaatgcatgcgtgtgtgcacacatgcacacgcgcacacacagagagacacacacacattatgtgtatacacacacaaacacatacaagctaataacaaatacatataaaccaccaaagtgagtttggaagaaggtagttctcaaggccttgtctcggctcttcactggatggacgaggttgtgggaaatgacagctggttccttcctcttacaggcttcctttaagactttcagggtttaccttctcctggcctatgtggcgaaggccctaagtccccttgttgcttatggtcctagtggatatccacagcttttggctagaagacctggctaccccctggcttataggcacagaggcaatagatgtaacatgttctgcaggtgttcagcatactatggatccgtcaactctgaagcttaccaggtccttctaatgtaattacttattggccaacacacatcacctttttagattctctgcctgccttgtaccctagagctcaaagccttctcacctagcaaaccactattaattttgattaaccacttttgttatagcttaaaattcctcataagtataactttttaaagctccatacaatgccatcatatgcactttacttatttttgtttcacatgtgtttgcatattgtattgcatattgcatatttgcaaactgctggatttgagaatatctaattcagaagtaagccagtgatttatagttcttttgttataagtatagaagaatctgatgtattatattttgaaggtgcttttgtagttcaacatcactatgcaaaaccacctacataaaacacaatagcattagaaatcaatgtttgtaataaagtagcttgtttctgaaatggccctgttcactgctgaatacaatgcacaaaagcctttaacatctatcttctttgaagacttatccaaaatgcgtcacctctctttgaatacattagacactattctttacatgttcatacttcattaagcttttcctggtagtcatattttgataaatataaagtggttctagctgaagaatgaaggggggaagggaatgtgtgataaaaatagagtggcctgaaaccaataaaacagagaaagatataacaaacctacgtaacatttctgctcttcaggcatcatttcctgtgtttagaatcctgtttctcaaactgaaatgtggggcattttagtcttttcaaactggacttacatcctgaatgtagctcccaaactcttcagacttacaatttcagaatttgaactcaggatcagagcctttacttcacaaagtctagattcctcctggcatcactgtcactctgaacaccaccagtatcttggttgcgcagtttagaaactcagtgcttcaaatatcaccatcttttctacaccagtaccaatgccaaggtcaaatcatgctgatttgtcttcctgagctttcaaacctttctatctataccactgttgccctggtttaagctactagtgtccgctatttgagtgctgcaagtgaggtagatatggtggtttgtgactctacttccaaaattcaggagtcagaggttgggggttcaaggcccatttggattacataaaaaattagaccatcctgagctacatagggatggcctgtttcagaacaccaaaataaacagaaaggtaaatattatatacatattcccctttcagtctgaaccagcattttaacaaatggcatcttaggtttccccagcttcaaactattcagtggtgttttgcttagaatgccttcataagaatagaccctacctctggcacaccgtggcacccagcttatctctcctgctttactttacccaaccttttcccctagattttaatcttttcaaacttgacatccaacctctaatcaaattatggaagaatgattggcgtatgattcccacccccagtctgcaatgcttctgcctacaactactttatctgctaacaaacttcagttaatcagaatgcctctggggagtccaggcttggtggcacatatcatcaattctggaactcaggaggcaaaggcaggtgcatctcagtgagttgctggctatcctggtctacctagtgagtttcaggcaatcctgggctacatatgcaatcctgtctcaaaagaaagataagaaacaaaaagaaaagggaaaactcgcgctaggtagattctcctctatttccttaccattgttagacacctgaactatactttcttatatttagctatgagactccttaatttttgttttgtgtttttagttgtttttctagttttttgaggataaagtctctgtacataccccaagctggtctcaaaatagtcatcttcctgcctttgcctctaagtgcgtggatctaaagggattgttactgttgttttgtttttaaatatccgtttcctcactagattgtaagtatcaccaaggtgacgctctctggttttattcattaatatagctccatcaaccagcacaatgcctggtaaaggcagaggcttgataaacatttgttcagtgagcgagtgctgactgcacagcactagggcataggagaaggtccccagagaaacacatcccttcatggggagaaagtggcagctctactttgggttgagatgctctaattacgttccctttacattagattagttctaactctactgggatggagcttagagagctggatctgcccggtggaaccattctggggagtgctcacgggggtccgcttacaaagttcagagcatgcagcagcaatctgtgacaagaagccaatctcaggcagacttcatcaggcaaagagaaaaacaggcacctggagagtcaaggtagtgtgttcaaatctaggtcactccatgttcttaataacgtagagtttcacttctttatcttttgcaggctgcctctgagtacaagaagtgaaatgttggagccagcttatactagttcacaataggcaattgttagacatttgcaaaagcctccaattgttaacctcagatgttactataaattaaatgatataaacttacaaccagatgaattatatttaaaataatacctgtaatattcaaaatatatccctttataattactttagtaaatattattatgatgaactgtcatcttgggatttgttgtccctcttacacatgaagttaaatagcatgtaatagtgggctgatgactagtgactagaagactaatatctttagttcagccatgtcattggatagcttgagattgcctctttatctcgtgggcatcactaagtgttaccctagagcgttgtggggctttaacttgttggcttgtctgaattttgtgttttgaatatttggtgttttgcttgattttggtttctgagagtcaattgttaagcagttgttagcaaaccccaggaaagctttcattccctgcccagtgcaatccaattttgtacttaattgttgaaattacccagcaatactacagaaacaccagagtggagtcaaactgtgaacctctctcagtcttgtaaactatatttgccctaagctgcatcccatataagggtattgagctgaagtgactgaaacaaaagaggagcagatgcaatctaaggcacatccatttcagaatacccaaggtagtcatgctttaatgctattagcatatatctagataaaccaataaataagtcaagcaatggaaaattttcaggcaatcattgacaaatgcggtgattagaattctctggatatgaaagcagataacattatgtctcatttcaaaatacaccagaccagaccttgaatgtcatcttctcaggaagacacaagaacatttggcttcctgccttgcaacagattaacaaaatatcctggcaaaatttttggtgaggaggagaaaaggtagctaaaaagataggaataggaaaaaaaagagaaggaattgaaaaaaaaagagaagaacctgagtaaacacggtggagatgtgaaaataacctcacagataactcataacaaggaaattacaacaaggaaaacgtacagacctgatctgactaataaggtcctgggatctgtactgtattggaccatagttttataaaattaagagtgtttcatgccccttaaactcctttctgttccctgcgcagaattgtgctgagaaagctggcaatggctttacagcacggagacatcattagcccgcaggtctcattgaatagacccaatcacagaactctcgggatggttttctccttgttgaaattggaggtcttagagattacaactctggtcttcatgcataatgtgctttgatgaatagctataagggatgttgaggataacttcttacggccaatgaaaagcacacacataaaaaggcatagttaagccaggacttatttaggttctgatagttattcctagtgaaagtagatatccaatttcatcgagactttggatggtgaagagtttaatatctctaaggttctaaagaagtaacatcatattgttctttgtgtattgtcagagaaaataaaaacttcagtatatctgggataacagaaaaaaaagatgtaagtaaatctaaagaaagaatgaaagtcaaaatatatttaatttttaaatacatgtttagaagcttcagccaatatgtgcctcttctttgacactcacagacaaatccccatttaatccatactacttcaattatttgtagtgagtcaataggaaaacctctctcttagctcctaaaagcatttagttttaatgagaaaaaaagatatgttgtagctaccatttatatcactatttttcatgatagtgatcatgtcacttgcccacatgtgcattcatgaatgcatgcacacaagcacacacacacacacacacacacacacacacacacacacactcatacacttactttaattcttcaaagacatgggatccactttacaacttcagttcactcactgtgccaatgctgtacatagcaatcattgtccttagtatctacatcgtgtgagatctaaggtgatgctcagaaaccacgttgctttacttttaaaactagttgaatgaaggagctgataattgagaagttctaggaattttttttcagctctctaggaaatgcttcccatgagaaagcaaactgatttcaaatgcatgattttaaaatacaatcatccctttatacatgaaccatataagtctgaatacaattggtaatgagtactttgattggtaagtcagatagcaaaatgttctggctattatgaggttaagttattccatggggacatcattctggtgttttttacagaatctgatacctcccccactgggtgacagacagaaaccatcatgagatttggataaactcccgagggatcatacccaattgccactttcacaggaaatccacacaatgacgtacacaggaattctgggttttcaagctgccctagagtcaaaaccatatctgtgaacacatccgaaacagatggaatcaaaggtcaccctcctgaagacctactgaccctatgatgatggattgccttcagttgagatcagacaatgaccagcagagccagacactgcacaggcttgcagacttccatcaccaactcctctgactcagccttgccaacctcgctgccatttcaacactggggattcaaagctaaagctttctgaatgatagatagtaggtgtgccatgaaaatgcatacccagtcctttagaaaaaaaaatatctctaacttacccaaacatgtttgaatttgtcatccttctgtttcagcctctgtagtaggtaggattacagcatgagccactgtgcccattttggcattggctagtcaagaaggaacattgtgttgcagtttaaatctctcatttgcatgaaggaactgggaggaactgtaggtgttttttcaatataaactgccctttggctgttggccatccacagtttgacttactgttggttagagttgcacctccaatctagctaagacagatgtcctcactggaaacccttccaagtactcctctgggtatagacccagtctgctattgtaagttcaataaaccgtgtccagtaacaatgggtcagtacagcagtacaatcttagtgtatacagagagagagagagagagagagagagagagagagagagagagaagttgacttcaaaacaaagagaacacttgttattaaagaattgtcagtcctcctctcaagtgtgctgtcacattctagaagcttccttggcaacatacaactgccacagagtaccatgaaagaagacagatgtttctccaaaatagataaataaaatggagatgaaaaacaaaacacggccaataaaacaaaaccaaacaaacaataaacagtcaaagaaacaaaaaccttaccagtcagggagataagcaaactcacagaaatattggtgtatgttttagccaaaccatgttaatactggaatttaccaagtagactggcttccctacaggctgagggggaaggtgatgtatttcaccctctgtatagggtccttaagcatgaaggaacccagaattccttagtagctgctgtgtgcatatccctccccctccagactactcattttcatgatgttctatagcagttttgctggcaggggtggataaatagatgtctcagaggttaagaatacttgttgctcttgcagagaacaggtttaaatcctagtacctacatggcaatcacactgtactggctagttttgtgtcaacttaacaaagctgtagttaccacagagaaaggagcttcagttgaggaaatgcctccatgagatccaactgtaaggcattttctcaattagtgatcaagggggaagggccccttgtgggtgggaccatctctgggctggctgtcttggattctataagaaagcaagctgagcaagccaggggaggcaagctagtaaggaacatccctccatggcctctgcatcagctcctgcttcctgacctgcctgagttccagtcctgacttcctttggtgatgaacagcagcatggaagtgtaagccgaataaaccctttcctccccaacttgcttcttggtcatgatgtttgtgcaggaatagaaaccctgactaagacacacacctatctataactctagtttcagggaatctgatgcacttttgtgatctttgagggcactgagcatacacagagtgtacatacatacatgcagacaaaaaaatagctgttttgaaagtgactgcatatgctgtttcatttttctgccatttgaactatacacaggatttttataccaatctcattgaatcataccaagaaatatgcctttctatttacaattattacactgatcaaatgtattgatcaaatgactttcacatttctaacttttctcatgagtgatgtaattcagcttgagaaccttgtattaagttctgagactagaattgtcttcatataagaagtattgaataaatctaaaatctcataaagacatatttcataacagtaaaaaaaaatgagtatggtaggttcctttgcatcggcaaacagtttctgtacctgaaagcctagcaaacaaataaaataacttttccttaaaagtcaggttgactagtaaagctacaaactggcatgcattatttttaatgatttatttatttttattttaaatgcattggtgttctgcttgcatgtatgtctgtgcgaggatgtcagatcccccttgaactggacttacagacagttgtaagctaccatgggaaggctggaaattgaactcaggtcctctggacgagcagcccctggtcttaaccctaagcctccagcgccagcttagtattcataaaatcagaacaaacaaagccaacttatgtgaaaagttttcatttgtctctggtattcagaattatataattacttcatcatgtcatatttgagctcccctttcttagctcacttcttactttgctcaggagtcagttaccaagggatggtagtaactaactaaccttacccacagcaaaactctctgttctttagaatgaacatggagtaaattaaccgtgagtcctggtgactgagagaaaatggaatcacttatccagaccagttctgcttcttaactcttacaggaagagagataactcaagagttgaaaacctccagggatcatagttgctctgattagctccaactggagagacacagaaagaatattatctgtggaaactaagccttgatgctgagcgatgcaagattctgagcgcacctcagctcttagttttccctctgttatattgtttaagactcttggaaaggctagagtctttacagaatttagggaaagtttgttcttaaaaacagctctagtctttgtattgacatgttgaagtgctcttgaatctgagtggttgagtctcctctgacgacctatcaagaattttgagactcataaaatgttgcttgggacaaaagccttagggcacaaagtaattcgcagaccaactatgacaggcctttgtccttgttacaattttgattctgcatgtttgttgttagaatacgacactcattttccaaaagtgtagacctctatgctcactgaattctttgcatcttcaaggttcgcatctgtgaagctgatgaaggtggtttccctgggttattcctttgcacaatctggtggtctaaggctgctggagacagcctgtggtacttgaagagatctgtctccttatcagcatacacctctcaagtggctatgctgagagatgatccacacttgagaagttatagtattagtatagacaagattaaaaggagcaatggtgtaagagaaattgaaatacagcttaaaatatcacactctaaagtataaaaatggatgttaaaaatcaactttcttgttagatattttaaatcatttctcattttgtatcctgaactatatgattttaaactattagcattattattaagagattatatctccaatctaggtgctcttctagtttatgttcaaaaataatttaaaaatttatgttagaaagatgcagagttgccgggcatggtggtgcacacctttaatcccagcacttgggaggcagaggcaggcagatttctgagttcgaggccagcctggtctacaaagtgagttccaggacagccagagctatacagagaaaccctatctcgaaaaaccacaaaaagaaagaaagaaagaaagaaagaaagaaagaaagaaagaaagaaagaaagaaagaaagaaagaaagaaagaaaggaaggaaggaaggaaggaaggaaggaaggaaggaaggaaggaagataggtgaagagttcccatagactcaccaatactcaagttccattgtcaattctttcagtgcctgctttatcaacttaagcccatacaccaacactaactacataaagaccaagggacttttaatgtatgtatgtcaccagccattagtagtaaaacatacaaggatgccttgttccatgtacatccttgctgattgtatcttgcagtaatattgttatagcagacagaattctggaaatcctttgagcatcatttgggcaccccctttggagagcctctacatgcctctagctctccagtttcagtgatatatcacatgcctgctgattcccttttcatcttctggtggttctacagcgctgaaatcccgcactttgtttgagtctataactctccttttatgggttacagaagtgatgttctgagggaagctgctcatctttccaggaggcttcacttggcttcatatgctcttgccttactggtggaattgaattgtcagccctttagggcaaggtttacttcaccatagcttgcttgaaagtgtacctcttcctgcagccacagaagagaaaggtttatcaagtgaagggaaaatggatgatacagagtgagtgacttagctggaaagattttgcttatttttattctgtttttttaattcatttttttctttgcaagggtttataaaaatccccagaagaaggcaagagtaaccagctcaggaatcgggccttggtggcctggcgtttgctagataaatagaaatgcaaccctggtcctgctcagaagctggcaacaaatttgctaagtgattgatttgatgctaattttctgcatggactgaaaagtcctacagggcctgtcctgtgggagggaaataaatgcagccaagttgactaagccctattttcagttttattttgagttctgcgagtttggaaacttccctttcccagaaaaaaaaaaaagcaaaaacaaaaaaaaaaaaaactatatctccaagggattgttacttatagggttccaaaagactgtagcttgctcagaaagtatagcaagcttcccatgtccaaatcccagaacatactaagtgagggacttaaactgtcatatgcaaagctcatgctaacaccctgtcttttatatctgtactcagtgcggaagaaaggtcacagcaagagacttagtcatgtttctgccccaggaacttttctgtgatagttgcaaatcctggagacaaccagcttataatgacaatgggctcagctctgctcatattttagggttccagtctatgactgctcttggcgatctagtgggtgaacagcacatctcacaaaaacaagcacatagcaaacccattcattccatggcctggaaaagctaaaggagaggaagaggagaggtatagggttcaatatcacttttgcagggatgctcgcagttatcagaagactccaataagactcaattctactccctaacttcggaccatttaccaataataccaacacatatgcttctagtagcaatttaattgtttaaactgtagcagaaatgagcatttttattccataagattgtcttttgtttgtttgattgtttgtttgttttaacatgtccatttatgggatgaaaaagataagattcttcaatttcaatgtataactcattagatgatgggagggaatagaagaataattctgatgcataaaagtgtgttgtaggatggccgtatgatggaacgagtacttcactgaaaaccacatgtcttgaactggaaagttttcctccatagctctgatctctccagtcactgtaaaatggaagacttctattcatataagtttcttctggaaaaggcagttctacttctagttcatttaaagtttttctaccatgttagaatttttccttatattctactctttttgacatttcttattcaggaccccaagttgcgtgaacttctggatgttgggaacatcggacacttggaacagcgcatgataactgtggtgtatggaccagacctggtgaacatttcccacttgaatcttgtggcttttcaagaggaagtagccaaggtatgttagatggggaccctgaaagttgtcatcttcacctgatttttggtgataatgtttaatacatgtggaagatttttgattcgtttaatatgtagtttgggttaagctgccatctgaaaataatttaattgttaagtatatatgtatttaaaacatcttttaataatagcatctatgttcagcaacagagattgttttcattgggtatagggcattagataaaatccctttgcaaaacaaaatgtagcacctggtgagcatccttccttctcttgttggtgttggcacattttttccttccttccttccttccttccttccttccttccttccttccttccttccttccttccttcctttctttctttcttcctttctctctctctctctctctctctctctctctctctctctctctctctctctctctctctctttctttcttaagacagggtttctctgtgtagccctggttgtcctggaactcactttgtagaccaagctggcctcaaactcagaaatctgcctgcctctgcctcccaagtgctggaattaaaggtgtgcacgaccaccaccccgtggcaccatttctaattccattttcatttctaactctccgagggtgctcagcatcaacacagtctaagcctatttcccctgcacaccacatagaattaccagcagtcatgtagtagttatttagttagaacatgaaataaaaatacactttaagtttaaatagcaaataattattcagctattgactcgaaaggtgactttaaaaatggggtttcccatcgtaattaattactatgctacttaaaaagcaggccttccagatgtacacagaatgatccagagtatacagacaatatagcagacaagaagctgtaaattcttgggcgtgatatttcctttaaagcagtagttctcactctctctaacactgtggccccttaacacagttcttcaagctgtggtgaaccccgaccatagaattattttgttgttacctcataactataagtttcctactcttctgaattgtaatgtaaatatctgtatgtaggctatctgatatgtgacccccaaagggggtctagagggactactgttctagaatgagcattttgaagggattgaaacaaacacagtctaaagaatggctcccactcccatccatgttcatactttgttttactgaacttcctatttccttcaagagttaagaacatgaatctaagcatatttaggggcctataagtcatctgtgtgccctcacagagcatgtatattaagatcacagttacagagtcactcctggtgagggtgtgttgtcagggccttgtggtctataattggattttggtggtctgacagttgtataactgaacctgttagcctgctctgtcatctgttagtgatttttggcaggggtttatttctgaccacctctgtaatatcaactttggtgcttttttaaaagtatttttaattaatttatttttttacactccatattttattccccccacccccaatccaccttctgactgtttcacatcccatatctcctcctcgcccacctcttcccacatgcatgtccccccacccccacccccaccccaactgacctctaaactccctgtggcctccagtctcttgagagttaggtacgtcatctctgaatgaacacagacccagaagtcctctactatatatgtgttgggggcctcatatcagctggtgtatgctgcctgtttggcggtccagtgttagagatctcggggttccagattccagattactcctacaaggtctcccttctcctcagcttctttcagccttccctaattcaacaacagacgtcagctgcttctgtccattggttgggtgcaaatatctgcatctgactctttcaactgcttgttgggtcttttagagggcagtcatgatagaaccctttttgtgagagctccatagcctcagtaatagtgtcaggccttgggacctccccttgagctggatcccgctttggccctgtggctggactttcttttcctcaggctcctctccattttccatccttgtaattctttcagactggaacaattatggatcagacttgtgactatgggatggcaatccattcctcacttgatgtcctatcttcctgctggaggtggcctcgataaggtttctctccctactgtcatcaactttggttctttcaacagaatgaataaaatactaaccagatacaatactctgcgatgttggaagctacattttccatgtatgttaaattctgatctgttttctctgtgtaacaacaaagtataatttacacttggagagaatacaatgtggagagctctgccctgctggcattacacttgccttctcttcctccctgttttagaattcttttgttaacttactgggttgtttaaccgcatagatgactataggtaaacaaatgctatgcatgtcataaaaatttctctcctctgacacacctacatccccctttatgaaatgaccaatcttgatatccattatgtttctaactaagcagtgcagtaaatgtaacctgcaggcaggtctttactgagattgaatgtagacctactatgttgcacatcaatctgtatatcttctgttgctttaagcctttgtgaagttatattcttctaaatgttcaatttcctcctctctgtagtttgaacacaccagttttccttagattataatttctaggcccatctgggtgaatccagtgtggacatgaccctgagtcaattgagaagaggggaaagagaggagccaagtctaagtgtaggagccaagaaagaaagcagaaggtaaaaaggagcagggaaccaacatggttagcttaggtatggaagagcctcttggggaaggcaatgacatctgttgcatgtaccaggcagggactgaaggatgctgggagaacctggtggctaggtccactgtgatatataagtaggtacctcagctatttgatccagagtttgagacttaagtcatgatataggatgcacagtaaaacccggtgtcccctgaactttgaattctagcagaagacttagtttacaagtagacagtagctcatgccattattcaatatgtatttgcagcgggactctttcctgtgccagacataactccagtattagagcttccacgatgaacatggatattacttctggtgttctagaaaaaaattaccagctaactctcagcaaaacatgccttaggtcagttaaagtcatgtgcagaagaataaagcaggaggcctgaggaggtagaagcagaaggaggaacgcttctcttaataagacagccagggaaggccagtctctgaaggaagctgtgcacttgaaacactagcatagaaacaattccaaactcactgaacttagatgctttcttatttgtttatttgtttttgagacaggggtatgctatgtgtgccagcctgacctcaaaccttgaatgttgtgtagagcccagggtgacttcagacttgcagtcatcctgtctcagccttacatgtgctggagctaaagctgtgtgccgctccgtgtggctgaaactgaaattttaatttagtccttaagaaaagacagatatacaaaggaaactgtcttttaatttccctctgtggtcggactagaaacagtgtcccttacagttaaacaacagtcatgtcctgacacagcctgacgtgccagccttcctgctcctgagcaatcagcttccctctggggggttaatgtgtctgaggactaggaatggaagtcacagtgtcctctacacatccctgctttccagaaggccagcagccatactgtgtttgctatcacttggcactccaggatcttctctcacctccctgagatgccaggccacactgcagagcttcagcagcgatggggaatgtcttggtacttttaggttcttaactttgattccactgactcctctgtgcaatctactgcaaggttggggggtatccattaagtaaatgaagacaaaggttgaagagaatgaacaaaattcatcataaatgtggctgcttcatcatctgagagaaaggaaaaggaatataaaaacctggacaagatatctttagggagcaccctatattttttttaaacatcacaccgtgactacatcctccttgaaaaccccagcaatgccagtcactggcctcattcagagacacatgtctactagccatcactactgttgtcttggctttaacttcttctattctcctgtggaccttggacttgaaggcttatgcaaacatagctatcacacctcattgttctccttcagaatcatctctgcacatgcacttgccctatggcttttcctagtagtctggtagagcctttagttctccaagttttggtccagcttcctttgggattccctgctattcagaggtgctttgatgctcagtatccctgttcatatctcatttaactcctgtaacatcctcagccacaaggacaatcactctttctcagagactgcaaaggcagttgtaggcttaaatgtgtgcaggacattgggtgtattaatagctacactgcacagaaataaggtagagaagattggagaggatgttagtcccttcgaccatctccatgggccattctaatcagtgtcaccgctactccacttctccaagttgctgagaacaagtaggtacaaaacttgattgtggccagagtcactagagagccttattaaaagactgggtgcacagccccacccagcgagtctggagtagactctgagtatttgcatatttagcaatttcccagaagatttgtatcctgcagatctagctaggctttgcaatctagcattgtctgacctctgggtcaaaaggaactagagaatccagataggatgttaaatatagacagcagttgttttcatatatcacgttagatgaacaattagaactctgagctggatgtgatttggggacttccattggcagcttttcaagctagattcgtattaaggaagacaaacattgcactgaatagaatctcaggtcttgacctctgagcacaatggggacagcccatcagcttacttacaagagccaactctgcattcttaagcacatgtgtatactctcaatgtacaaacatttcccagagtctttgggatacctaagcaatatggactttttgcatggcacttctcatattaatgacttatttgtatctccactcagcttgcagtcttaatcaggtatctccatatgctgtgatgtgggagtggggggtgggggcagaataacatgaaggaaactctttgggatgcctcttgtctccacctctgagcatgtaaggaaaatgaaagtttgaggggacagactatgatgtaagtagggcaaatctacacactgctcagtattctacaagatcacctctcaaaattcaacccattaattaaataaatgcaaaacaagcagttcagctgttgctgaggagacaagagtgggctgttgtgttgctggagaaaacaaggccattgtaaatgaaatgtttctccagcacagtggccattttttttttttttttttggcttactgtaggaaagaaataagcaggggaggaaatctatattaataagtccgaaattagggacataggaaggaacacaggaaagggaagaaaacacttaaggagtctacagaactgaaatctcagccatactctcctgacacatggatacgagcctggaagcgccttgagaatttatgtaaggttttaatccataaaatgaagaagttgggatcattcccccattgacatattcaacaattgtatgaagctctgcacagtatcacaaggtctgttctagttgctaaggataaaacagtaaacaaaacaatgactttgccatatggagcaattctggtgagggagagacaatcaagaaaatcaaccaggaaggaagggaagactgtggtcagcaaaggtcaagttgaagttgctagtgttgggaagtggacaatatgtaagctggtcacaccagacagctctattacccaggaaacaggggtttccttcttaggttctcaagctaaattattccttaataagaaataattttaaaaacaaaaccagaaggaggtgtgaagagagaaacctacctttgttgacaagctgtaaaccctgaaggagaaagatagaaaggagagagagagagagtcacaccatttgcaatggagtcgaaaagcattcctcttgagggctcgataggattgtgaattcagaaaaactataaaatgcccagagtgcctgagaaaacatggtttttgtgggtttgtgggtttgtttgtttgtttgtttgttttttggggcaatacctaaaagaaaaagaaacagaaagaaggaaaaagatggagctggaaagacagcacagtagataagagcgctggcagctcttgcagaggacctgggttcaattcccaacacccatgtggtgttccacaacctttcataactctagttctaggatatccaaaaccctgttttgactcctcagagaccaggcacacatgtgatacacagacatatatacagacacccatatacataaaatagaagattctttttaagggagaaagaaaataaaagttatatattttctggattgggtggcagaaaagcagaaaagatcgtgatggaagcactgtgtagtctgcaccagtggagaggcttgcggcaaagaggagttctttacctcatcagggtgataatcttctcttcttagggtatgagctcctgaccaggcaagtagcagacccagatgggttaacacttaagaggaggagagcctagtatgtagtgttttaggtagcttagaatatcagatctccacttaagctgaaagatagaacttgaattctgttttaactagaaagaagctgctttgtctcaatggcctcaaggaagaccagatacctcctgccgccttctcatagagtactttaaatccttagaaagggcttctttttctagagttaccagacattagataataaatagcatttaaaaccatcatgaaacttaatgaagctcaatgagagatcagctgggaagtgaccaaatgtgggttgaggttcaaaatcaaccgtggaggagaggtttgccctttaaggcctctaatggtgttaatccctgtagtatctgtgagtttgttatgtcccagcaaagatttgtagcatctgaagaaataatcccggaatatgttttgacatagaatattccagatagataaacaaaatgtataaaagttctccagcaagatagagtttggtatgtctagagacagcacaaggcacacacgacaggagagagacagcaaggctgagaataagccatatcaaggaaggactccacttttattgtgagtgaattcgaagccattagggagttctgagctgagggaagatgtaatctaacttagggtttcttcagtaataagtagggtcaggggagggagatgacagcaatagagaaaatcaagttaagtagaaacttctgcactactctaagtgaactgccatttatgggagcaaagaagaaatttcagaggaaataaaagggggtctgaatctccataatttgaagtaagagccaacagcagaaacttatgaactatatataaaggacaaagaaagatggtgttggcattttgtcttgaatgtggcatacttgagaattatccctcattgacataggaaagtttaatctaaactgtaaattttgagctcgaggtatataccagagattaagttttgatcagttcagtttgagatcatgaaaaatccatgtggacatgctgagtgggaggttcattatgtgggcctagggttgaataatgaatgtgacatacaaatttcttgaattagatatagattagatttattaatattagataattactagtgtttaaaatcatcatgagacttaatgaagctggatgaaagatcaactgggaaatgaccctagatagagaagatcgctgacctcagagtcatgaacaccccaacaaaggagcaacctgcaaggcaccagccataaatgtgtgtcatcggaagtcaggtgaaagacaatttcaagggtgaatgaaatacactataccagtattgctctgagttccaaggaagacaaagaccagacattgacaaccggctctaatgacaccaaggtcactgatataaagacaccttgttagggacagacacctcagtggagtctcaggttcaaatccctgaccagaatgacattgggaatttgggatgcaacaagaaatgaaaatcagattcctctttggaaagtcatgatgtaatgcacaacagggacatgggaaaattcctgaggcagagagcaaggtcaaggtgcttttaaggcatgaaataccttcttatatatgagggagactgctcttgtacaggaaacccagctgctcatgcagataagtggacttattaggaggtatctttgactagacaagagaaagaggagttagtataggatttgagagagttaagtctggagccaaactgagacaaccctctctttttataagtgagatttgatgcaaacatagcaacacccatttgcttccatattgtctagcgatgtttgtacatggcaaaggtaagttgttatgatataaatcataaaaataatcaaaagtcaaaaacactaccatctgatctataactccaaaatgtccagccgtaggtcagtgagatggttcattgaccctgacagtctgtgttcaacccccagaactcagaagaagagaaccaactcccacaagttgtcctctgaactctacatatgtgctatagcatgcatatgtatatatacatacatacacacataaatatatattatacatacacatatacacattcaatacatacttcacacatacatacacagttatatacatgcatatatacacatacacacacacatacatacatacatatgtacacacacacagatgcacacacacagtatgggggaggagctgttcccattctactgtccagagaagcagagcttaggtgggagcagtggaatgggcactttgtttaggtgaggacagaagaatgcactgatggtcttagtagctgaacagcatagaagaaattccttctgattacttccattttcttatcactgaagctgaattttactcagtgagaacaatgagtatttgatttctccagcacttttcttcactagttagtgaattactttaaagacctaactggtgaggttacctcaagactgtaaaaggcaggtcatttacatccttccacaaaatccatgtcatttccagtaagctaaatgactcatcaggacgaatttgcaattcgacagtgtgtcttaagagaaaatggttttcttctgcctgcccactaaaatactttatcatgtatcctgtttttgtatctgggtgtggtagagaaactgccttgtaggtgtgtctactagtatgttataatcacattcactgtgagcagcatcctgtgggccgcaaactgtgaagtgctgtgagccagaggcagcctgtcccaggtcccaggattgctatatgctagcatacaactttgggtctcagggaccccaattacagctgttaagagaacactcatttcccaaagaagctcaaccagtaatgaaatctgtcctggaatttagcccagaggaatcccaatctgtaaagaaagcagaggcaccaccttactcctttgcatttagaaagccatgtgtttacctttgggtctaataagctccttatctagtcatcagcagtaaaagctctagagagcctggtgcttgtggtctaaggagaaatgggtcttatatgtgatgcctgagtggctggataataggagacttgtctgctcgccccctctctcattcctgttccatgaaattagtgaagtcatctgccacctgacagacaggataccaggctctgatatgaaataccaaattgtaggacacattggtaggacctgcacttgtgcatattgcaaatcagcacctcttttgtcagactgcagccttaatgttgctccattctgttgggaagcagcacacccaactgctttcgagtccagtgggttgagacagagatgtccaataattgctgagagcaaattgtatgtcgcttaactgcgcaagcattggctggtgcagctgctttcatctttctctagcagtgaactcttttaagcatttataaacaggcaaagcgtttccgtatagccatatgaatgttcactaagcacccagcaaagtgttcatatcctaactatagcctggtggactttcgacaaggaagcacacccatattactaggatgcagatctaaagctatcccataaaatctatcagcaccaggatcccaggcatctacccatctaaaagtccttcttctaacgttgatctcttctgtctgtttttcaaagtatctttaagtggttttatagaatgtagccattattgtctgtcttctattattccagatttatgagtttagtgttctccgctttatggggagaatttgctaattctctttgttacatagtattctgttctttatgctgtaattgacagataccctgacagttcctaatttagaactattacaatccagaagcaaagcagctgcctttcctgggggcatacactgtaaagtgtgattgctggtcataggtttttgttttttctatgttctgctttaataggtatggcaaatttccagctatatttttaaattttgttttgcacacacacatacacatacacacacagagagagagagagagagagagagagagagagagagcaggagagagagacagagactgaggcagagagagagagggaggtagagagagacagggagagagaatgtattctccaaaatcattgtgtgcacagagcatccgtcttcagcatctgcactttctaaagggatcctctgcaggtctgtcttggcaagtttaattcacttgtttgaaggttacagtgtgagcgttcctggaaccttctttaacttcatccacacaatctattttcccaacttctatgcaacatcaaagctctccgtctctcccttctaatgagctcttctctcttcccatactttcttcctctgggttgtcttattcaaatcttaaaaggtcttagtgataatcatcttccttctcttctagaaactttgctttgctttccaactcaccctgcctttctgcataaggtctaggcctcacttgagctccaccatctccttttccagccaaagatctccatgaaattttcactggtctttctgttttatcaaaagtaccatcatgttttctgcatgttttactctggacttgcctggtggtgcatttaacgcattgccatagatatgtgacccaatgaaagcaaaacagcagagctcagtccctcttggaaagagaaattgagttctatttgggcatgtgatggatagggttctgggaagtgtctgggggggggggtgaaagaaggtgaggaagaaggaagggctaaagagaatgaaggagggataaaagaaaggagtcatttcaacattgagaacaacggatagattgtgtaaaaatgttcaagtcctagagactttgagcatcatggactctaatcttctcatctttcagagtaaaagaaattgaggttcctctattgggaattgtttcaagctttctcccatggaaggttcccgtgattttccaaaatgttaagtaggaggacatggactgtatctcttacaaaggcttccctttttctgattgttcccaaacccaacctgttctcactgagaaccccagttgctgctgtctgtatacccattggtcactgggaactttttaaaatatgaacgtcaacttctacattctagcagttgacaccttcaagctaaataaatgaaagaagttgatacataggaaagactattttttggttttttttgagggagaaaaaaatcagctagatacagaggtacacacctgtaatcctagcacttgggaagctgggatttagtatggtagatgtaagttcaagacctgaattatggtgccaaacaagtaaacacaagaagagagggaaagagaagaaactgtatattctttgaaataaaggtgaaaagtaaaaaggaatagttgtagagatccacctctgagctgttattttgagaacttgatgcataaaacgttttgcaagtttttctttgacattcttcaaaattagtagtagtatatgttttaaactgatctccaaagataaaaatcatatttatttttataatgggaacatttacaatatgcagtttattttcatttcaggatccatttgtgatagtagtcaataactaaaacttggaaattttaaaatgaaaagtagtaaaggaaaaagaaagagtgctataagttaaaatccacagtgtttagagatactgtgtttgactctgtaacaggttgtacatatgtcacaagtcaggatacatgaagtagacactatatttattatattatgagatcatatatttattatttctattcactttacatttcaatcactgtcctcctcctggtctcccttcccaattacctcccctccttcctctccccctttcctctgtgagaatggaggacccctggctctccccgcgccccccccccactccccgcacattaagtctctgcaggggtaggtgattcctctctcactgaggccagacataacagccgagttaggggaatggattccacagacaggcaagctttagagatagtccccagttgttgggggacccacatgaagaccaatctgcacatctgctacatatgtatagggaggtctaggtgaagatgatctatggttggtggtccagtctctgagagtccccattctttattgtttccaaatacattgcaacaacacatgcctatgtcatctctcattctcccccaccaatcattacacaggctaagatcagtccactgtgttcttgatctgatagctatgcacatctgtcactggaaaatacaattttcctcactttctgtgcctaaattttgcaaggatattagtcagataaatcctaaatttgacattgtggaaatgtcagccacttggaaactcgtataaaagattagaacttcagaagtcaaaagaaagaggtttataacagaaagtgaggaaagggcaccttggactccatctcctccttacaccatggataagccacagcagctgccattctggaatgttggagaaaagcatctttgccttctgtctttgagtctcctttctgcatgtgttaaacatgagctgattggagccagacaggattccacatggagatccctgagcaaaagtgaagggaaagtataaagatgatcaaagaaatgcttgagatgtctgattgtgagctaccttgtatcccagtagccccagaaattcaagacagaaagccagctcagcagcggcatcttctctcctcatcccccatcccacgggacagagacaagatgcttccaacttgctcctttccatcactgtcttcagagacctggtagctgaatatgtcttgaatgtgttattttggagccagggcttgaaggcgacaggctgatacagaaagggagagttgaaaggaattggaaatatcagataataataataattaatgatgatggtgatgatgatagaaagggagagagagagggaacaggaagaaagaaagaagagaaaagaaagataagtcactgttggttttttgcagagaagaagagcttgaagacaatctgactgtgtcttatgttcccctccatatgtaaagtcctggagaaaaacaattgcttgacatcctatgagaaagactggtggctgtgccttgacatcagtcacactgtcttgaggagtcttgctaagtgttcccaatgtgtaatctgtacatcactgaagatgaaaagaagttcttgagactaactaactagttaattttcttattggcagtataataatatccactgattcgaacaaagatttacttacccgctgtttgtcctgcacagctctgagcactaaggttagagaaataaccaaacataagaagagaaagcagactgagagcaaaacaaatcaggacaggtcaaatgcagagaactggggagggctagagagtgggcgaatgtttgaatacatgagagaatgcccatgaatgaaaacctgaggaagataagtgagacaggatcccaagaatgcccagaatgatggtagaacttgggggccagtgtagttgaagacaatgtgtagaagacgagaaacgacaggatgtcaggtgatgccagcccagtgtcagctggcactctacaagtcacctttattgttgtcactgaccaggggatggatatggtgtgccacactctaactgtattgctctgcttccagacatacaaaaacagaagggagaaggatacctgaatgcttgggctaaagtctaaatagagactagactcagaatctatttccaaggccaaagatttgttgatgattttgctgtataataaaaggtaaaagaggatgctaagatgcctacagaaatttttttaagcaagggaaaaatcagaaaacagactcagaacaatggattatgagccctgagacctcttaccctgcttaagatattatgaaagagataagaaaggaatgtgagtagttgtcaccaagagaatgatgggggtcattaggaaatgctcagacctgttgagacactgtttgagcttgggtaccactggtcatcaagcacagaatgagataggaagtggggtaagaaggagggcaaagggagatggaggtggacctcagagaagcatgtatgagggccttggttcaatggggaaagaacatgcatatgttcatgtgtggatgtacatgcatgcacacatacagagagagagagagagagagagagagaaagagcaagcaatgactaactgaaggaaaactgacaaactgctatcctctcattccttcctcctgcttgtgcagaagaatttgtagccagttacttccagtgacactgatttcagcgtttatcttttaagaaactgagcaaactctttagacagaactgtggtgtgatgtgcaacataggagtcaaggagccatggtaacagtagcatggaaaggcagaagtttctctgtgtgtattattggttcttttttttttttaatgtaaaaacacgaggtagtttaatggcggagctccgggtcgaaaagtatctcacgcaggagacagtggattcgaccgtattattggttcttgtgtttcccactgtatatcaggaaacataaaggaaaatggtctttgctgttaatagatccagcctaataagaccaatgtccctggctatcttctcaaaccaaaatgtttgccatccctagatgtccatgtgctttctggagaacctatagatggaaatcatatctcccccaggacccccaacaacttacctatgacttcccctgtacatgtatacacattggagctaagcaaacagggttggatgtactgctagtacaggtgagagtgggtttcagttaggcaagggagtggcatggtagcacttaccaatgtatgctccagctcagaggtagactataacagctctgaagtccagtgcagaaaactttaatgtcatctagaagagagcacaacaatatgaaaacaaatgagaagccaaagccaaaggcacagagtagctcttgcggcagaggagggactaacaggattaaggttcttgccaagggccaagcctctcctcacttcaaggaaaagaatcaagtctactactgggtttaaaataaagtcgggaggtataattaaggcattttaaacagattgctttccaaatgagaaaattacattttacctgaattccttcattatgttatatgttaatgaggaactacctgtgagtacttaaaacccaattttccaggaacagttttaattttgtcaaacgtttctgtttagcaaataagcaataccatttacctcccaagcaatggtgattgctccctgattccttcttgaagtcccccccaactgtgaaattagctgtgatatttcttcctttccttctttctttctctctctttctttctttcctcctttcttttgtttaatctttttgcatttatatcttcaaacagagtttcttttagaataagcagggctagataattactataatagcagaacctgcttgcatgcacttattatctgtagtgtgcagtactaagtcagccatgggcaaaataattaatgctaagaccattaggattagaataatgccaaatattttcataaaagtgatattaggcaactgggggctactgtcccaagcatatagccagttgatgtggagctacgtgtatgaatcattaggagttccatacccaagggatgagtcaggaaagtagctgaagggataactattgcgcctctacctacccagctgatgcaaaaagaccctcaaagctcacaactataacacagacctctcctcatctaatttcaaaaagcacatgtagctgtctttttctttcatctcttcattggtgtgaggctggatgccttagtccatctttggctctgtaacaagataagtaagtgtttgaaattgtaaaaaaaatagaggttcatttgtctaaatgtgttctgtggtttgaaatttaacccagaggaatcacatctggctagaaccctgggctctgatataaaaggaaagcaggtttctatggaaaagacataagagggtcacgttttttaatatctcactctgtgtcactaactcagtcccatgaaaatgaagactccctcacactccaattccaagaacaccaataatcttcctaatgaacatgtcacatcttgatggtcccattacccaagaccacaatgacaattaaaatttagcatgagtttcagaggagacaaaccttattaaaactgcagaaagggggctaatatttttcacactgttctcttcatgataatcttagtctgacttcactacattaaacttctcctgaatgttagacaaataacttcctaaggaatctagcattgtagttgaccttgcacctgcctaaaacagatgaaactggacctctgcatggtcaatgtgcttccatgcatgcgaatgcttttctagaactgcagagcaccatttagcacagtgctgtttctcttgagtggaggaaggtggttgggtatcacttcttcacaatgtagcacaaagcatagagcaaggtgtggagcaggccagagctgcagtacacatgccctaaacgccagcatttctaaccccatactttttatggaatagtccttcagcctattaaacctaacatctaaaaatcccattccaacacagttcacattacaataggaaacacagaaagtcaacatcaccaatcctgtggccaaaagtgatgttcaaaacttaaaactatggggagacataggaattaatttccaaagacaaaaattctcaagcatagaaattttttgtttgtttgtttgtttgtttgttgtttaacacgtgcacttgtgtggtcagcttaactcagttactaagaattttccacccagtttgtagacacactcagacacaaatgatgagattctgtttaagtgaagcaaagacacacatgttgtccccatgcccttaaacaaaattcatggtgttttctacaccactccttctgcatactgattcacttagctcaggatttggcctcttatgaattacaaggttctgacatgaactgattgtctgaaagatagatccattagaccagtacatggaatgttctacaaaaagtaaagaaaccagtcagattatctgtggcgacaggttccatcatctaggacagccataggaaagactcatagttggaactgtaggaaagagctcaccagttggaaaagtatcatgccatctggaaaagtctgagggcaaactcattgcaaaaccagtaagcaatgtccctgggcttttgcctcttggctttttgatgaacttggattattcatgcatttcatcttctacaatttggccagtttttccatcaattacaatacataaatcaatgtccttgatcaattttccttatttcccaagttagcttgagttgcacattagtcaatgatagcctaaaggcatctgaaaataatgatgcatctttccttgctatacctcaagctgacaaatattatgttgtgtctcaactccggcattgccagacactaatacacttcttgtttggggtttcttgtggctgacacagtggcaatggtagtcttgtcaatttgcgattgacaatcacttctctttgggtatgagatgaagataagaacattctgtcgatactctgttaccaaattttagaccaggagtgtcagaaatatttctaacattctgagtgttctatctcacagcacacgggcagtgacatctcttagggtcttttctggctcaaccacaggctgtgcaacacaaagattcttcacagcatcatggagacagctgccctgcatcatggattttccttcatgcagtggagtgcagtgaggcatgctcaggcaggaaggccattctgaaggagcatgccaccttcctcctcattcatacctcgcgctgataccacatactgtcacaaatttcactgttacaaatacagcagttagcaactacctgcaagtagaatatgaagtacttaaaatgtgtgacaagtgttgaaatatccagctttaaattatgacaaatcccaagaccctttctaaattcactatataaaaggagagagaaatttataaggaacagaggatacttaggccagaagagctgccctgatagtaagtgctgatgtgtgccattttaggtttttctaagttcacagaacgtgtaacatcaaggaacaaactctaatataaaagatggatgctggtgataataatgagttaatgtaggttgattgagtctaatacatctaccattctagtggcggacatttaataatgaaacaagctattcatctgggagtgcaggtaagacatggaaccctatgtacctgccattcagttttgcactgaaattaaaatggtattaaaatgtttattgagagtgtaatttcagaggctgaggagatagcactatgaaggaaatgctggctctttggctcttctgcatatacataaagccagttgtgatagtgcgcatctggaattacagtgctggagaagggggcagagacaggcaggggcctggagcagccagcgtagtcaaacagcaacccctgcgccgggcatggtggcacacacctttaatcccagcactcgggaggcagaggcaggcagattggatttctgagttcgaggccagcctggtccacaaagtgagttccaggactatacagagctatacagagctatacagggctatacagagaaaccctgtctcaaaaaaactaactaactaaatatataaataataaataaataaataaatacatacatacatacatacatacatacatacatacatacatacaaaaaaaaaacccagcaacctctgggatcagtgatcgacgctgtctcaagacataaggggagaatgataaagtgaacacgcaaagtcagtctctagcccccatcctcataggtacacatgcatacacacagatgaccatagctcacacacatgtgaatacagcacatacaaaagatttttttcatacataattacaataaataaatgtgccaaaacacgatctttgcaagtactttacagcagtatgcattgacttgtaattcaatatgtatacagttatattatgtattatatgcacatgtgtgtaaacagggagatactcagaggctttttagaatattttcacctcctcaaagaatattttgaatgaatatatgtgatggtttgtatatgcttggcccagggagtggcactattagacagtgtggcaccattggagtaggtgtggccttgttggagtaggcggggtactgtgggtgtgggctttatcctagctgcctggaagtcagtattctgctattagccttcagaagaagatgtagaactctcaacttcttctgcaccatgcctgcctagatgctgccatgttcctgccttgatgataatggactgaacctctgaatccataagccagtcccaatttaatgttgttcttagaggaggtgccttggtcatagtgtctgttcacagcagtaaaaccctaactaagacaatatatatttctgaaagaggctacgcttagccttttcttttgattccagcaggttagtattaagttgaagccattccctgggaaactgacaggccatgatgccatgagatccatttataacatgaagacacttcttgcttctgcaaacagcagtgacaatgaaactagtgtgcgtttgagcctagccctcaaacaagcaaaattccacccccttttaaaaacagtgaaaagaacaatgaggataaaagtggattgagattataagtatggggccagagagagctaagagaacttgcattattgcagaggaccaaacaaatcgatcagaatatcaatatgaaatttgaaataaaggaaaaagaaacaaaatagctttcaaatacataaagcagtgctcaactacattggtaagtcatgatgtcagttataaccgtgatgactcctaggtggtcagctgtgtcaactgagtacctccttccctgccactggttgtcagaaactcattgaagtagatgatgaacagaagcgttgtacattctatgagatgggcatggccacagaggtagctgctgatgctctgggagaagagggttctttcggctctttacaaccacaacagacactcatttggctgtgtcctaagacaaaatgaagtatgaaacaaacatttctaaagaaataaacatgaatagtcatccataaaagtagagattctcaaagtatacatttctgtagtggaagaatgtgggagttaaaatgaactgggctatgtacaataccattgttttaaaggactactattgattacaaacagtgtctagctgagaaatagatgcactaatttcaaacatagagggagcctagttagcagtaggaaatattgtcatgaagaggtcctagactgtttgcatttcaggggtcatttccattaaaaaatagtcacctctaccattacaacatgaaaatagacacaaacatgcagaaatgagaagtgtgtctgtgttaaaataaaactttatttataaatcaaacagcagacttgattaaccgcccccagaccttagtccactgaccccatctataccattgtcttcagaatacctataaaaataggtgtgatgttgatattggtacagcttcctcctagagggtaaagaagggaagacacaggaagaatcaatttaaactgtatttcaagagttttcaatgttatacgtatatatttaaaaaaaataattaagaaactgtgacaaaatgttaatgtttgtcaaatttctcttaatggatagatgtgttgctgcaccagtctatgtgttttgtatgtatagcaaaggaaaaaaggaaagaaagaaatactgaaaaataaaaggtaatataaatgcattagaacattccaaataccgtgaatcagagaagtagaaaacagaaacattgacaaaaaatgacattttctttcaaagacactgtgtgttgattcatcttagccagaagctgaattagccctggagaattcctttctgttctcagaactgggagcatttaactgatctaccacatgtctggggtttggatgaaagaccaaaatgagtcatgttagggctggacttttctctttatttctgctcatgaactaaaggaaaatttgagctgagctgatactcatctcaattagggctgcagaacatcagctttgtgttttgtggtgggctccatattctctccattatattatttcttgtttctctccaacttcattcacttcatccttataaggtagtggtgaagtgtttgcaagaggcaagcccaggttcaaattccaagtgccccttagctatctgtgctcatgtatgctagttattgaacaactattcactttttcatctgttgataacagactgtctttcaaatgatattgtgaagattaacacttggttatttacaaatgcttacaagtgccctggccataggaagttggctatagaatgcagttcagtgagtttatttatctgtttgtgttgcttagcttgaattttctagaacaatgcagtagaaagcacagcatctaggaattcaggtttgaagtccaagaaaccagtgatctaattgtaagcagtattagccctaagacataaattgtaagtgctttgaatctaagagccctttctgtaaaataaaggcaacagctatttatctcctagtaaaagattgagagtcaattagtggatgcaaagatcttttttttcagaatacagtaaacattcaaacaactgttatcagtgtaatggtatttgtgactaacaagtgttcatagtaccaagtaaacacatatgccacatgcatgtttggaaatcatatactacaaatttcacaacatagctttagaaataaaagggcactacctctgtgacaccgtaggaaaagtatctttggacccgtctaaactggagaaggaatagaaacggaaacactgaaactttaacagattcaactgcagatggtattgagagtcatgttctcaggttaagatctttgtcctaagagtgggatcaaacccgaggcaggaaatgtcctttaagaagtttcaagatttaaatagctggagccaagccaagtgcagtgactgtgaatacttggtttccttggaaagggagagagcagtttctctagagcaaaggagctgcccttctcaggccatagaaacgaggactcagcattagatttatgaagacaaggccccgggaagactccatggctctacactgacgcatagtccatagcctcatgatgagttcaggtttaaagtccaagaaaccagaaatttgatcccaaataatgactcttatttccttatacttaattatactctggccccttctcttgggccaggctgtgcctaacacagctgcaaggtctttgggggaccacacaacagcccaaaatcatttatttatttatctatttgtttatttatttgattgaagagggaacaaataaaagactgtgctgaagctagccaacccagattccagactgccctgctctttcaaagggctgctttgggcctagccatatatttaaatgttggcacatataaatcacatggaggtttcctgagtaagtatagattctgatgcagtatgaagcctgaaatcaacatttctaacaattttcatttttacatccacatttacactcacccatcacatgaggttgggtgaattttcttattgtggtagcacagtaatactcaaacaggtaaaatgctgtctaaatatcttagtaaaaataagtttatatacttttctctattgcaaaatttggttactagaaaattaaaaattctacttggtttacattatattcttattggactagatataatgggagatgtagattttcagcctaaaatgtcagactataattaaatctccagaaatagttttaattcctttactctttggcttgaaataagctctcaaccgtggttctccgcctttctagtgttgtggccctttaatgccatatcttatgttgtgatgatgatcccagccataaaattagtttgttgctactttataactgtaatctttctactattatgaatctcaatgtaaatatctgatatacaggatagatgatatgcagtctccacaggggtcatgacccacaggttgagaaccactgttctgaaaagacccgatgagactacataatgacctcaattataaatattttcactgcaacatagagttgccatagagctagaaaaatctgaagtttgactttattccagaaaaaaaaaaaaaaaaactttaaaaaggaaacaaaatcttaaaaccagtggcaatgtttattgtttattttcaaactatctaattttattagaattgcttttcacactgttaaaaacagtattttgatggtcttctgtgtgcacttcaagtttggtagtatacaattttatctcccctttataattgtcatgtgctgttgttttaaatcctgggcctatcatctgtaaaggtcagagctgcggtccctcactcacactggtgctgcctcctgaggtccttatctttgcaatctcagcctcagattcaacattttattgctgtcagatggtcctcctggtgctctcctttgccctggctctcactgcctgtcctggaaatgggcttctggcggtattgctatctttctcctcatacctattagtcatttccttgttaactcctaatgtgtttgctgaccgctgcttcttccagttagttttctgtcttgatccatctgtcttctcttactcttgagccactcttcttccaatcctctacaaagcaacccattattgcatgatagcacattattagagttttaggccaggtagcaagcaatcacaaattttaaagatgctgtttaaagattagtaaaatcagtagtagaaataacaaatataaggtaggaaaatgatgaactaaatacattattttataataaatacaaagatcaagagattctaggttgtccacaagaactatgtgagctcctttcctgctggtatcttgcatagtgccagatggtgttcttcaggatatgtgggcagggggtggtaaaagcatcattggtcttgcccagatgtcaaatctataaactacaataccaaacttcaagttatgctcatgatggtaaccatggcacaacttgaatatgggcgaccacatgctccctgattggacatgaagcccattccatatataggaatctatgcctaatactataaatctggtcgaaaggacatgactgaagctattttaggcctgagatggacacttagctactgctgcataactaaattaacatcacatcaaaccaccatctaagtatctctttatactcatggtcaaaggctactctcagcctcacttagagaaacctatctttgcattaaacagatgtaaatgcaaagagccatggttatgcaaaatgctgagactaaagaatggttgaggactcagtcagaagaaaaaaaaaatgtttctgccagttcttgaagactcacagaacattgactgtgacattgaacaaagaatgataagagccagaagataaggagaaggtctacagaaagccatcttctaaacttggccaggacatggcaatcataaacttgtggcatctgtgcctaacagcactggaccacacctttgagatcatcaacaggcatccctgaatagaaaaggggctcacagcgtccttccatttactggtaaactactggcaactaccagattctgaaagacaggaggcaaattgcctagatttacactcatttttgagcctgtgagactcatagtagatactgctcaagccatgatcatacagacagcctagttaaactctgagggacacaaagcccaaaagttatgaatgtaggaaagataatgtgtagggaaaagcaggattggcaggggtgggagtaaaaacaacaacaaaaacaaaacaaaacaaaacaaaacaaaacaaaacggttaccagaatgagttgtataaatcagtgaaagtgtttttaataaattaattaattgtaaagtgaaaaaaaatcacaaaattgagaattgaatatctattgtatgaaactgataaaaatgccagcagtaaattcccacacacacacccaataattaaatgtaactggagtaagttctctaattaacagatgcagactgactagctagagtcttttttaaaaagaagatccaacaatatagtgctgttaagagactcatttaggacacacataaactgacagtttaattaagaaatgaaagaaatctactacaggctactgctagccaggatgaccacttatggccgctgtatattagataaagtagacattaagttaaaaaaaatcttttaaaggcaatgtcatacattatgacctaggatcagtttattaagaggatatgaccatatatatatatatatatatatatatatatatatatatatcccaaataggtgagcatctaattatggaaactaatctcaatagacttatgaagaaaggcagactgtaatgggaacgaagggatttgatgagatggttcataacgtaggaacccaaaaccagacctagtgatgccagatgtaattgtcctatctatctgtactggctagttttgtgtcaacttgacacagctggagttatcacagagaaaggagcttcagttgaggaaatgcctccatgagatccaactgtaaggcattttctcaattagtatcaagggggaaaggtcccttgtgggtgggaccatctcagggctggtagtcttggttctataagaaagcaggctgagcaagtcaggtgaagcaagccagtaaagaacatccctccatggcctctgcatcagctcctgctccctgacctgcttgagttccagtcctgacttcctttggtgatgaacagcagcatggaagtgtaagccgaataaaccctttcctccccaacttgcttcttggtcatgatgtttgtgcaggaatagaaaccctgactaagacaaattggtaccagcatagtggggtattcctgtgacaacctgaccatgttttggggaggactgtggaaggactttggaactttgggcttgaagatccattcgttgttaagagctctgtcagatgttgtgtaggagcttggaagataatgttgagaacactgcagaagatggaggtttggcttgtgaaatttcagagggaaaattaaagactcttttcagggccattgctgttttgaatgtgaagattctgtagttctggttagctggggctgaagaatcagctgtgattaacaagataccagaactaccaaagcaaaaactttgcattactgggactattgatgctggttagctggagctaagaaattagcagtgattaagaagagaccagcatcattgaggtgacatcttctgggaagtgttttctgaaagcacaaagaggctatgttccagagatggccaaggttgtactcctgctgcagcaggacttggtaatatgtaagggtcacccaggtggtactggttttgaaggcatgaaggggtgacgcaaagcagctgaggctcggcactgtgagaggccatggaaggccattggtgaaggtgcagcctcagttgcaattgaaggcccaggactgaaggggtcatgcagtgttttggcgatgccagtaccatgagatgaccaccaagagcagcagcagcagtggagtacaggcatctggagcctagaggatgaagcgtgtgctacaaagggcctggctggagaagtgacccaagcccttggaggagcccagaagatcatgagttggataccagacactggacggttggagattgacttttgcttttgattgtgactgtgccctgatattttccctcttgaaggaagaaacttttttagtgtagcccacagttaagagacttttaattgtaaaaagactttgaattttaaaagagatggatattataaagagattgaaattttaagaatatgtaaagactgtgggacttttaaagttatttagatgttggggatgaataagaatgtaagggttgaggcttactagtgatgtgtttgtgtgtcaagttgacaaggggtcaattgtactggttagttttgtgtcaacttgacacagctggagttatcacagagaaaggaccttcagttgaggaaatgcctccatgagatccaactgtaaggcattttctcaattagtgatcaagggggaaaggccccttgtgggtgggaccatctctgggctggtagtcttgcgttctataagagagcaggctgagcaagccaggagaagcaagccagtaaagaacatccctccatggcctctgcatcagctcctgctccctgacctgcttgagttccagtcctgacttcctttggtgatgaacagcagcatggaagtgtaagccgaataaaccctttcctccccaacttgcttcttggtcatgatgtttgtgcaggaatagaaaccctgactaagacactatcattcttacttagctagacaaatgatcattatatgctcagagttatcaccatgaatggagattgtagcataccacttcccatctccttcgaagccaagtgagatcactggtggctgtgtgagatatagagcagcaagggattcgcagggtgtgaagaagagagagctccatgttgattggaattgaggctgcatctgactaggatttagttaacatcaagaaatcttcagtatatgagtggggaagcaaaaatgaatttttttcagttctgttgaaaatgtaattacctcatttaaaactgtattgttagtctacatttgttcataattcaacaaacaatagtaaagatttatagttttaaaaacacagcagttttatcaatggggaatttgaaagatagaaaatgtatctttatctatacaattcctctttaaaagagaactcacttagattttaatttaattataagattttctatcaaaaaaaaaaaaggtgggtaggaatctgttcacatccaacttgaattgatttgtctgtcttcctggcagacgagtcaaaagcatattttatacctgaggagtagttaaactaatgaaactgtgatttatatttttcaggaatggacaaatgaggttttcagcttggcaacaaacctgctggctcagaacatgtccagggacgcatttctggagaaagcgtaagtcaccctgattgtatttcttagggtgttgctccttctgagtcagtttcctttctcctttgtgaggcttttgtttatgctaccttggcttgtcatgttcataaacatatatttccctttgggataggtagttggagggcaggtttccctactgttcacacttggaagacttccaggaaagatggctccttcccccaagtgcacatcaggctgagatggcctgaaccctagcagctatattcagagcaaagaattgctctttttagagcatcctctgctgcctctgcctgtgtcctctcttttattaacatttgaagagaatgaacaacatatgacttgtttctctagatttggagaattttggtgggtaccaccagaatgtcctacctccttcattcaatgggagcataatagaattctagaccttagagacatttgcatgaagcaatagaggagagagtagaggaggaacaaacaaggaaaataagaagagaaggaaaggaaataggatgaggaatcaccctggaattacaacagccattctaaaaattacttgaacaaggaaaataattaagcagcagggaaacaggagatgggtgtgttcctccttggtgactcttgaggttcagaagcttgggagacccttaaatcaaaacctcaagcagaagtagtaattggcatggctctgtttcactgaagagacttctgtcttcctgcttgttccagaagccatcccctttggtttatgcctcatcacagccacattctgttttgcccttctgtgaattttagtcccaggtcttcactctaatgcttcatcatggagtgatcccatctcccttttggtaccttaagaatcttcctgaaacatcgctcccctttctttctcctttcttttcaccctgtttatctgacctaccatcctccatctatcaagtatttgtagaacatatatttttctagatagtgctaatgaatgagacacagagagaaataagatgttcaagctgaaacacagcatggtgaaacaagttgacagatcatagtctactgcaaatgtctgctccagatggataacctttgtgaaggctactgtgggaattgcagcacatgaatgttgatgaatgtgttgtgtacaaatctggatgtaggggtttctgggtgatgggatgtgcagtgtcccaaggcagcatttcctactgacactcacactagtagtggttgagagttctgtggctctctttacatatgtgtctgaaggtaggcaaaggggtaaatacagtccttatattctctgtgaatttcctatgaacaaactataactataaacaggatacagatgaatcacagaaacttaatactgggggaaagaagccagaccctaaacacaatcccaccttatgtaaggatcaaaaacaagcaaagacaatttctgctgctgaatgtaatcatgacaatgatttgtagggcttgactcccgaaggcatgagaggaacttctggaacgcttctaaagagacagtattccattttaccatccaggtaccaatttggatatttgaatagtttggcaaatttagcacactacacatggacatgagttcttctcagattctatttttcagtactttgtaaaattaatgacttattttgttgttgttggttttgctctcccaacagatatactaagctcaagctccaggtcaccccagaaggccgcattcctcttaaaaagtaagctgcacgcgtgtttatcatcattcatctggtttgtccccgaaacttaaatctctgccatgggtctcatttatttcttcaccaggctgggttgaagcatagaaatggtgtgggaaccccgtccttcttcatgctagtctctcacaagacagctggcttccttatgacacttccctggctgccacttcctgtggcatcattttggagaatatgtgggaagcaggtagaggggagagggaaggaattccattgcattgatcccagaattcagctgagattcagatctagtctagaagtgcaaattgtgtaacctggatgcccctagtggtcattctgagacagggctctcaatgtccagtagacatgggtgacaggcagggagcataaatcacaaaacaagagatgaagagagccactatgataagccattgtgtgcatgatggcaggtcacctttaccttgcagaagtgctgagcactgggctgggtttggtaatgtttcaatagaactcacaaatttagatctcggtattcaattcctagcacttactttttaaaaaaaatacaaagctgcggccccctattagaacagattacgcagaccttcagcttcaacatgagagccagctatgagcttcgcacagtgtaccatctgaggcaatgtatataacaaggggcaagattggggggattggggaggtcatttattttaggaattaatatgaaaaaaatagctagtgcagtagttttcattgggtcatctccactaccttagaatcttgattgtgtattagacactgaacattttaaagatattcatagttcttgagaacagacgccaatgtgtggaaaacaaatgattggtttgtcactgttcgaagctacctaactttcactctgtgtagtatcttgagttgggggttgtttgtgtgtccagtgaagcacttcaccttttaaccagctcccacatgtgttttccctctgtagcatctatcgattgttctcagcagaccggaagcgcgttgaaactgcactagaggcttgtagtcttccatcttcgagggtaagcatggtgtctttcctctatcctaccatgtaacagttctttaaaacctgtactaaacttgtactgcctagtgttttgtagacatagcttgatgcaattgagaaactcataagtaaggtgggcaaggtgttacatgcctataaccccagcaatcaagaggtacaggcagaaggagtgctccaagtttgagactagcataggctaaacagcaagtttcaagccatctggggctatgtagtccaaacacatctcaaaaaaacaaacaaataaaatcaccagcagcaacaaaaagacaattaaaaagaaatataacttatttgttaatatgtataatgtgttggaccaattgttaaagtctctcattctcatatccaaaacagctcagtctggaatgaccctttgttgccattggaaaaaaaaattatctgggcatgttggcaaatgcccaatatttcatgagtttatatacagaagatatgagaatagcattttaagaccaatctcagccacatagtgaattaaaagctaccctgcggtacatgaaactcttgtctttgggcaggaatggcacagagagaagcagagacaggaagtgggagagacagagtttgagggggagacaggaaggacggaggaaagtctaattaatgtgtctttgtgtgtgcactcgtgtatatatgtgtgtgtgcgttacgctgtcaattttcaatgtgatttgaacacatcaattataataaacccatttatgtctcttaggatatacctattgataatgttgaactattatgcattagaagagcattttcaacctgactcagaacctcttggggggggggggtgtcaaaagatcccttcacagggatcacatatcagaaatttacattacaattcataacggtagtaaaattatagttatgaagtagcaatgaaataattctatggctggtggtcaccacatcgtgaggacctgtattaagggttgcagtgtttggaaaggtaagaactgctgctttagaagctggtgaagagcaagataacaaacttcaacttatttcatgaacctctagttttaaaatgtattcagaagacactgttgacacatggtgcacgtgttggtaaacaaatttagtacaaatactccccaaggctgtgcccacaggttctactgaaatggatacaggttcaaaagagactggaggtcactcaccactcacagggagaaggccaccacacaagatgtgccttttattgttgtgcctgacacacaatgaattccatatacattagccaccgagaggaactcctctccttttcatttcacttccctataattctaaaaggatgcattgtcaggacttctgggataacgggatgttgcatgaactctgtaccacatgcttatgtagaagtttcctttcccttccaatttagactcacggagtatctaagcaacaagtaagcccttatctaaatcattaggtactggtggggcctctgggcctctggagataactaaccatgtcccagttgcactgagattggaaagctactttctaacatacgatgaaatcatagtgaaggactgagctcatttgtcatccaattcttattccaaactttagaaaactaaacaaattagaaagcgtgctagttggttgtggtattgcatacctgcagtgcctacaatcaggagcagagactgaggtcactctaagtcccaggccatccctgggctgcagaatgagactgtatcttcgaaacaaaactaactaaacaaacaaacaaacaagaaaaagttctttaagaaataaaatgaaaggaaagattttgctaggtcacaagaatacctgttccaataccaattttgctctccttagtgcatgtgaccagttattctggaaagattgtctgcacagttcaggccctttcgctctatttcctttcttttcttctctgtttgagatggggttgcactggagatcaaacccagggcttctgtcagaactcaagagtgttgagctctggcaatccctcttcacaccattcccttcattgtgttgagtgaattaaaatactcagacatactcactattgcttttctggtagcagctttggtgtagggaagacagaacaatgtaattcctgttgttgacttgaccaatagtcaccaagctccttccgcacacccacaggcactgagcgaatggtgaggccctgggttccaagaacagtaatgtatttggagagaattagtcaataaatataccaagagatgcattcgtaaatggaaagaagtgctgtttaaaatagaatgggtgctgccctgagaagaaaaatccattctataaaagacagtgcacaaaggcctgagtctagggaggagtttgaccagcagaggaatgaccacactcacactcagcctaaagaggaagcacagagatggaattacaagacataagaagatactttttccctttgtgactacttctaagtttactttcctcaataaaatcttggggaatacaatgatcagcttagtgttctgcatccagtaaaatgaaagaagaaacacagaatgaagcaggacagaaaaaaaaaatcaagtccatcaatcaattctctgtaaattgcaattttctgaacaattggattctggaaattcagtcaataaacataaattgagtctttataatttactatgactattatagtcttacattttcagcccaatatcaactgaagatgatttaaaggaaaatgagattcaagcagtaggagttatgtttaaattggaaaaaaatacttatcttaagcaaattaaatgtaatgacaattttgtgaaaataaactgaagatattttaagatacaatcaacctccattatagttttgaaagatcattattcattgtaaactataatttatctgcaggacttgtagaattcaaatgccttctttaagatgcacaaacccaagaccatttcaaaaacaggaaataaatgtttctgtgagctgtctccagcacatcacaaacacttttcaacaatcctgtggtcatctcatatgtacagaacagtaggtatagggactagtcactgcttaactaaaagatccagagtatatgcctgtgggtattttacacattccagagaaggaaggggctcacgtcaatggtagatgattttgcataagtgggattctgcttcatagccagccgtcattcaaactgaacttaattgtgttctgtaaatagccacattaccagaaatgctgtggatatcctgttgagattttttaaacattatctttgtgcacgttgttaggaataattaatgcacttgaacttgtaccctggctgacatggtttgctggaataacacattgctttagagggttctcctttggagagtacagtcactagcctcaagttaccctaattggtaaaaaagtaatatgatacctaaaatgagacaaagcaattactggccttctattaataatccaaacatattttccagtgagacctgtgaaaaccttttcatattcagaaaattactattctacccacaagctctctgagaattgaaataatttatcagtaccaaattcccttgatttaaggcttattaacttgaaagggcttggtgacatttgcaattacactatagtcttgccatgacattggcctgtgcagttgcatttcaatgaagaaaataagaaataaatccatatatttgttttaaatataaattttactacagtgtgtagggagatatgcattaaatacatagggagacaagttattttctgcttaaagacttgaacgtatcgtctaaggaatgctatagataacgtttctaaaggaatgcctctgtgtagctgcaggccagtgccttaaattctgaaaacaaactagaaacatcatcattttggagtggaagtttctaaaatcactatattaaaattatacttcaagaattggcacaagaattcaatatacaatgaacaattcgtttgtagtggttccatagcttctggctaattcaacgtttgttttatgattctaagacaaaatatgcaaaagggctgactgtctaaaatgtactggttaataatgtactataaaacactagctagagtgggcaggtagctcatcagctaaacacttgctactcatccagaggacccaggtttgattcctggcgtccacgtacaactacttctaattataaggaatctgacacctctctggtctgtgggtactcgacatgcatatggttcacagacatacatgcaggcaaaatatcatacacatagaataaaatactaaaaagaaaatgataatgatgataataaatctatgggctctattagagtataataatttaataaaatgtagtttaaaactctttgaatgttaaatacaaattcatcataaaatgattctttaaatacacaagtatgtaatgcagaaaaataaaactaccatcctgaaatgaatatgaacattaagatcgtgggtttatggtgtgagttatagtttcaaaccactcggactcaaagtgtgcctgctgccaccactgtagctggcttaccaaggacctcgggaaaattttgagacttcctagcaccttgttatgtcagtaaaatgttaacagtaaaaagtagtcccaaggaccaaataaaaatattcaggaggtgcttgctttgcaaatagcaagtgctccatattaatgtgtgtggtccttttgagtatattatgtatatgcacatacacagtcgatatgtatctcctatattttatttatttcacatgtggacatgatgttaccaagatcatgggatctggaaatactattgctgacatcagaaattcttagcgtcatttctctgttaagactgcctatgtaagaacataatgctggagagatggctcagtggttaagagcaccgactgctcttccgaaggtcctgagttcaaatcccagcaatcatatggtggctcacaaccatccgtaatgagatctgacaccctcttctggtgcatctgaagacagctacagtgtacttagatataataataaatgaatctaagaaagaaagaaagagagagagagagagagagagagagagagggagagagagagagagagagaaagaaaagtgtcagcccttcacatctgccttaatgcgtcatgcttcctacaccaattgccctaattcacaccataatacttcaaattatactaacattcttaatttaatctttaaaagtccaagtcatggtagcaacagaaggtcactaaaggtgttttatattagatgtctgaaacaagattccctcttttagatcagatacttgcatatattgcatattacatattatatatactagacaagttctaatatacatcatatacacatacaaatacatatccagaacagtgcaagttctagccagtgctcaaggaacagcagagataattgtgcagctgagaacacaacacagatgagtattgaagtatgggatgagaacagaagtacagagcgaggagacagtgcacccaaggggaaggtgtgtctgttcagagagagacactgaaaactgacaagtaagaactgaggagtcagacagtggcggatgatgctcttcgataagatcagcttgtgtctgctagatgatgccagggagagagacatttcctagtagagtagggtatcccacttggggttcataaatgcaatgaaattgaatgtacttgagttaggtagcagtaccattgaaaatttttttgccaaagattttaaatcttcctctcacggccaaaaagttggccaagtcaacttgcctatctggaaaagcaagagaagtttgtgtctaactcagacagacagacactggcatcctccagtcagaggcattccttttcataagcaaaatacaattctggaggcctataactgggctgctcctgtctccattctatgagtggcaaaacaccaataaagtccttcaggaggatttctgatgttcttaaacctgagctcttgagctaatttcaaagctgtgtctaagcatcccaagtattgttggtacagagatctttcgtatgttcttacgcattgttttgttttctcaaaatccatttttctaaaatagtatcctttgcttcctataaatgaacttagacaaggaactatgacttcatttttttcattctgcaaacatgggaactccactctcggccaagtgctgagctacattttctgctccgttaggaagcagtgtacaatttcaaacaatgattttttttaagtgttctattaaaatacagttaaaatatatgactatgtttaaaaggaagggtgttttctttcttctggggacttgaaaataaaaataatcatccaggcacatacctgaaataggaagccgcgtgaaaaatgtccttcctgttaacaaaggctcagatccatgcttccggtttccatggcagcccaaccaaacacaaaacataagtcatagaagtggccttttatatcagtggctcacttcccaaacaatgggacaatgagcaataagaagcaaataattgctggggcttttctgcctaggaaagtgttttacaacataacaaataatggaacccagttctcctccatggcctctgcatcaatgcctgcatcagttcctgccctgactttcctcgctgatggactgtaacctcgaagtgtaaaataaaataaaccctttcctttctaaagagtcatcacttttaaaaatattccctcaaaagcctgacaaagggtatgacattgtacatactctttatgtgtccacttcaaatgcttaaaatggaaaagaaagctatatgtcttctaccactgcttttaaagaggaagactcaatccaaaacagagaaaaagactgggcagagagaaggacagaaggcagacaaacagacaagggggggggaggnnnnnnnnnnnnnnnnnnnnagagagagagagagagagagagagagagagagagagagagagagaataaagtgagctgggaagatgcttcacttagtaaagagtaggagaacctgaatttaatccccagacccacataaacaattcagacttggtggtccatgcttgtaatcttagcactgggaaaacaaataagggggttcagtggagaggggaagggaaagggggagagaagtagggagggaaagaaggagggtagaagggaatgaggcaaggtcagacaggtaagttaaacatttctaatgaacagattctgtcttcctacgtgtaacttactttagtaaaactgtgttaactgtggtaagctttaattaaaattaaaaatcaacaaaaaagttgtggttggcatgccaaagtcaggttctacatgaagtctagagttggcctcagaggtgttctctggattccttggactggtttggcaaaaaggaaaaaagaaaggaggagggagggagagagggagagagggaggcagggaagaaagggggtgggagggaaaaagagaaatcaggaagggaactagagaaagctcctgctcaccctgttgttttacttcccagaatgactccattccccaagaggacttcactccagatgtatacagagttttcctgaacaatctctgtccccgacctgaaattgataacatcttttctgaattgtaagaggatacattttaatctactttttctctagcttacaatgatagagtgtctagggcagacttttgttatgactagaaggagattgtccaaaagcagtggcttgaaggaggtgacaatctgctactggccttgacaagcaactactcttcttatgagcatgtgtttactatgacacatgtatggccccagatgtcatttcccatgctcagttggctttgtttagactgaagcttataatacagcaggaaatttcttaacataaaaaagaaagattcgtgtaacagaaggattcctgactgcacactatattgtactcctgtcaacagtatcagtataaagaagtttagattatgaaacaccctcacatacaacatatgattttctctgaatctaggaattacaaacgtttataatcattgctttttaagatgtatttttatttaatgtgtatgactattttgcctacatggtatctatatgctgtgttatatgcctagttttcttagaggccagaaaagggagttagagtccctgaaactggatttatacacagttatataagccaccatgtgggtgctgggaattaaatctggatcctttgcaagaataagtgcccttaagtgctgagccatctctctagcccctaggtattgcttcttgaagagacacatagatgaaaagaggggggaaatcccattaaatggaagcacaatttatcttttctaatataccaaaatctagctattggcaaaaagtcaatccaaatttggtaaaggaagtaactggcagacagacaagtcctgctgctgactgtcactttgcccactgaacacctttgtgacttcatcaccataaaacatttactgagtagccacagtatttataccattgaattgacatgggttgtcaactaaattgaaataggcatttgaataacacgaataacagcgttattttgaggataaaatgagattgcatgtttagctctacataatagtataagttgttattatcattatgtgaaagaagctgacttggaagagttagtaggaatttgaagccgacctggattgtagcatgctccaggataaacaggtatggagtgagtccctgtctccacaagccaagagaagcaaataaaagcagtataaactcttgtaaacctgtaactttggtgggatgaaaaagaaaatcatattcaagcacattggatttttttctttttaaagtaatagatcagcagtatatctttaaatgttacatgtgataaagatgatgttagtcatctgattcttctccaggttgggtggtggtagttaaggaagagtggtaacccaccaagctttgtgaagtggaagtagggggcgaagcagcatgtgtttagggcaaggttagaattccattatggactttccggatatggcggagtttgatttctccattgtcgaatgcatacaaaagttgtggaacagactgtgatttcttctctttccattactttcagtggtgccaaaagcaaaccgtacctgacggttgatcagatgatggattttatcaaccttaagcagagagatccccggctcaatgaaatcctttacccacctctgaagcaggagcaggtccaagtgttgattgagaaatatgagcccaacagcagcctcgccaagaaaggtaatatgcgtcactcactctgcaccacactgccgagaccctgcttcctctgtgactgaccacacttggggagtaagggattgaggtctctcctgtggactttcctgcttttttttttttttttttttttttttttttttttttttttttggcctgatgtagttttttgttattttaactttggtgatttacttttcgagttctgtttgtggtgcaagccacaaagttttaaatgtttcatctttttttccccaaatctatacagtaattgaacgtaatttttttctaatgcagcaaattaactaactaaattagttattccattagggtcatttttttttgaacgttctgtaaaatagcccatgaatttgtcttggctttctgttttctgtttgtttgtttgtttgtttgtttgtttttctccaagtctccaaaactaaagagaatattcactctgctataatcatatcttattccaatttacactaactgataaatctttccacatgtggagaatattctgaagtttgggcctatagggtttttttttaattaaattttggtagattcaaattaagcctggtaggaaaaaacaagtagtataaaatgacatcataatagcagctttgttacctggaaattatttttaaatatatatatatatatatatatatatatatatatttgaagatttttttcattagatatttactttatttacatttcaaatgttgtcccctttcctggtttcccctccgaaaaccccctatcccctctgccctacccctcctcaccaacccacccactcctgcttccaggccctggcattcccctatactggggcatagacccttcagaagaccaagggtctctctgtctattgatgactgactaggacatccttagctacatatgcagctagagccatgagtcccactatgtgtactctttggttggtggtttagtcccagtgagctctgggggtactggttagttcatattgttgttcctcctatggggctacaaaccccttcagctccttgggtcctttctctagctccttcattggggaccttgcgctcagtctaatggtagtctgtgaggatccacctctgtatttatcaggcactggtagagcctctctggagacaattataacaggcttctatcagtaagcacttgttagtatccatagaagggtctgggtttggtgattgtatatgggatggatccccaggtgggacagtctctaatatatatatatatattatatatatatatatatatataaaaggccctcattcaggagcctgatccatcatgactcatcttacttcaaatgcctagagtctttagggaaaaaacaaaccacagggaaccagtcattgagtagaaatgaatcgcacgttaagatgcaggtactttgtgtagtaacagaagtagcaatcacaaaccacaaatgagggtggatggctgaagttttatcatacattgtacttgtcctagaatcagtgctctcaaaagaaaaggaagctatgtattaagcatacaacaaaattgtattatttttcttcagtctgttaattggaaatttatagacaacttttcatcagcctctctgtgctcttggccaagcattttgccctgattgttaacatgatttccattgttgccattcaggtaaggtcagtgaaaggaggccacaagcccaatgttggccttgtcattggcagggctgccctgcaagcatgctcaaagatgtcttccccccaccccctaatgcctgcctcttattgtcaagctaggacaacttcctgacttttccaagaacagctaacactcaatggtggaacaattccagaatgagttctaaaaatgattagctcataacaatgtggcaaggaaaagcttttgtgaaaccagcaggcctccctgtggcctaatgacattgctcatgaaaccaatgactgcaatagccagaggcagcacagtgcacgccatcctgacacataacctctccatgcacgaagttcttctgcaaaactgaagagggaaaaggttttcactgttcctttgtgagtttgaaataaataatacccactagaaagcctctgacccatgtgttgtgatggtccagtgttaagtctactctggttattgaagtgttgagattggttttaattcttctggtgtgttctacctagctgctcgctagatcataaaaggtccttgtgtgttagactttcttttatttcccccttgacctataaagaagactggattaagaattcaatattattataggcttggaggtgaggtctgataacttacataaagcatttgtgctccaacaaagcatcactccccataatagagagattagattagtgtatctcacagaagccacaagtagcacatgggaaggataggtttgtcgtatgctaccaagatgtggagagatgcctgaccacttactagtgtaagatatgaacctctgtcacttcatgagacagaagtgataaataagcaaatctggttggatctgggtagggctgtcaccctccctccagtgagatagtctactctccagtagtcaactagtcaaattataagaggctttagaaggcccacttcaaccccaaagcccatacacaaaaaagaacctctgataactgtcctattttaaaggtaaaatgaaagtgtgtaatttggattagattaacacataatagctaatagattaccattattacttaaagtagacaaaatagaagcgatactagaatgtcagggtggctttgataatgacagttccccaaaaatctatggtcctggaaactcagtggccacaaaagctacccaaaccagtggctttgtggttcttatctcataaactagagataggtgttttcttttgccttgttttgttttgttttgttttgttttgttttgttttgttttgttttttaaagattaatagttgggagcgagggagagaggtccatgttgtttgagttaagccagcataaaggttagccatggtagaggaaacccaacacaccagaaaaaggatatttaggctttgaccagcatccaaaagaaaaacagaagagaaaaaaatattaagaaaagtaatgtattttgaaaaactcagaaaagcaggtagctctctcttgacacgcctggaatattaattattcttcctgtcttgttagcatggcttaaagtagacacatcttcctgagaggtggtccattagccaaaggattgaccacctcaactgcgttacgtgtttaagagaggttatgatggcttttctccacctagacatactgttctttgctatcacagacctggaggaataaaatataggccctagtctagctaattcaactctgtaagcatgcacacatgcatgcatctatattcttcatgacttcagcatttaaatacaaaacaaacaaaaaactgctaatgaaaatatttagagccaacagatcaaaagataaaagttttgatgttgaagacctgtactaactggacatagtggaacaaacctgtaatcccaacatttgggaggctgaggcaggaggatgtcaaattcaaggccagcctgagctatacagcaaagccctttcttaacaaccacaaacaaaaacagcaacaaagaagagtttgaaggtttctcctcttttcaataacagtaggatataaatataagtaatttatttctcaagtgctaatgtgtctcaaaatcactggatgccttgtcaaatttagattcttcactcaacatttctaacaaggtactgagcaatgctgacccagcctgcaggaccttcattgagcagccagggtttgcgaggtactaaaatgagtagaaagctgagagatggaatcccatagggaaaatccggggaatctccaagctgaattaattttaacagaaatgatcgaagattttccaggcgtcaaggataatacttttgtccattcatgcactcactcaatcatcttgagcatccttatataattatcactaagaaaaattaagacaggacttatgcagccatgcatgctgagtctgaagacatcacaggacagacaagtacgtctggacaaacagcccagacagtcgttattctaaatctccattagctacgcagaggaagtcttctttaatggcagcatctatttcttcatccagccacttgagtgagcgaacagcggtgatcgtgagctgttatattccaagacattgtgcgtgctgctcccacagcgtatgggaacaaggaagacgagagtttcttcttatttattcaccttagtttcatagtcattaggagaaagattttgagatttacctgtatggtggagaaattgcagtactttagaaactaaaaggttgaggccagctgtcatagtggctgcctttaaacccagaactcaggagggagaggcaagcagatctctgtgagttccaggatagctagggctacatggaaagactgtctcagaaaataaacaaagaaaaaaaagaaaagaaagagactaaatgtttgaaatattatgttagacaatgaaaatcaatgttattaatttagagtttgtagttcctaacctgttgtgtctgactttgggatttcttttctttaaaaacaaacaccattttgtctcttctttattaggtaagtatgagtcacagttaatctaggacaattttagaaagctatggtttacttgaatatggtggctggttcgagacctaaagaaatggtttctttaatcatatgactttaacaatgcatatgagggctagacatccagcttcatggtagtgcactgtctcacaggaaggaaaccctgagacccagcactaccacagataataagtgaataaatgagtgactaaatatttaaacacacatgaacatttttcagagagcaaagccaagactttttagtcaaatggcttactcaagacttaatgaaggcttgctgtttgtgacaccggctgtactaaatcaggtgtttcttgtatctttatcggtgaaaacatgataaaatagataccagagttcaatatgatgtcatagtttgttttctcctgtgctagcatgctgaatatttcctcaggcatacccaagaatcaattaagttggtgttaagctcaatactgactgacaaacttggtctgttttatctattttacttctataccctgaaaattacaagtcaacttttggtgtgagtaatgagaaacttatttaattgtgaatgtactaaatatatgttagaaatatacataaactctgattttaagaaaaatgtttttcttttattgaaaatagcctttccccttcaatatattctaattatgttttctctctttctaatcctcgaagctcctcctcatctcccaacccccatcatgatccataccttttctgtctctccttaaaaagcaaactggcatttaagggataatagataagacaaagcaaccaaacagaaggaaaagtccttaaagaaaggcacagacacagataaacacactctttcaaatactcagggaccccataaaactagaagctatgatatatacatgcaaaggacatatactgtaaaaacaataaataagtaaaaacaacattgaattatatttttcataaaagagaggaaaaaattaagaagccttgacactgcattgtgagacagtgaacctccaaagatgtccttgaatttatttcctgttggtcatctactgcagggcatgaggctgactcttaagagtgatttgtattcccagcaagactcccttggaaaaaattaaattttcaatgggctagatgggagaatgtgtcaatttctcctttcagctcaaagaccccatctagtgcagacctgtgcatgtcctatgcatgctgacctagagtttgtatgtccatctatgatgttaatttagagggccttatttttttctgttctccattctctgtgttctaacatcctttctgcctcctcctccaagaggtatcctgaagcctgaggggaaggatttggtggacatttcccatttagggccgagtgtccacgatctctcattttctgcattatgtcttgctgtgggtctctggatttgttcccatctgctgcaggaagaaacttctctggtggtggctgagcaagacactgatctatgagtacaccatgatgtcattgggagccctttgattgctacgttgtatttttaggatagtaatatttgcttttaccctttgtccctgggctatttaatctcagattctctgtcacacaagcagtatcatgtagtgagttgttcagttttcatgagtttgtaagctttcttttgttggtgatatccagttttaatcattggtattcagataagatgcaaggtgttatttcaattttcttatatctgttgaaacttcctttgtatctgagtatttggtcaattttggagaactttacatgagctgctgagtgttgcaggaaatgtttaaaaagactgacaggcttcccacactactgcagtgcaccagcagaccacatggctccaacagggtgatttcaactaggtggtctctctgggccggagctcccaagtctctcttcaaattgctgccatgccagccccacgcaacaaccgtccaccccacggtcagctgccagacaacccagcatcccagtagaagcaaaactgttgaagcttgtaattaaccagtgagatttatgtatcaataaattctcaattcacaagatgataatagaataatttcagaaccaattgataatgataaaaactgcccacctagattagacaaattatcccaattattctagccttatgatatcataactacctgtggctatctaaagccacagtgctttaggttcttcctgtctgtcctcctccatcttggccttcacccttttttcctagtttttgtctgtatgacctaataccaacagtggggtgttgaaaggtcattatcagtgtgtgagggtcagtaggtaatttattctgtacttgtgtttcttttattaacttggctacccatttatacttggtgcataaacgttaagaattggaatctatcctcttggtagattttcctttgatgagtatgtcgtatccttccatatctcttctagttattttggcttgaagtctatttggcaccagcttgcttcttaagttcatttgcttagagtatccttttccattcttctattctgccatgatagttgttcttattgttaaggtgtttttcttggatgcagcagaaggatggaccctgtttccacaactattctcttagcctgtgtctttttattgagaaaattatgtcattgctattgagagttatcaatgggtagtatttgttcaatcttcttatagtgttgtggtggtctctttttctccttttatgatttgctgcccaaggattatttattccttgtgttttcttggtgtgattaacctccccagattgttatttcccttatagcattttctatacaggctgaatttgtagacagatagtgcttaaatttgattttagcatagaatgtctcttctcctcctcctcttctttcttctttttcttatccttcatcttcatcataatcatcatcatcatcatctattgtgattgaaaaatttgctggatatgtttgtctgggttagtgtggtggtttaaataggaatggctcccttagactcttatgtttgaatgcttggaacataggaactggtattattaggatgtgtggccttgtttgaggaagtgtgtcatggtgggtacaggctttaatggtgaaggttttaaggtctcatatatgttcaagctaggcctaatatggtccagcctttaccctactgcctgtggatcaagatgtagaactctcagctccttctccagcaccatgtctgcctgcacactgccatgcttcctgccatgatgataatgaactaaacctctgaactgtaagccagccttaattcaatggttatggtttctcttcacagcaataaaatcccaactgagacagctggcatcagtggtccttgagagttttaaaacatctgttcaggcccttctaacttttagagtctcaacttaggagtcaggtgtaattctaatcagtctgcctttatatgttactttgtcttctttcatgcagaatttaatatttttcttggttgtagtgttttgataatcatgtgctaaagagcatttcttttcttgtccggtctttttggggttctttatgcttcttgtgctgtgataggcacctccttcttcaggtcatgaaaagtttctcctatcattttgtttaaaatattttctgtatctttaacctgcttgttattatgttttcatcttcctttatttctgttatttttaaagtctccaagacctttggggtgttttatacctagatttttttttaagatttagcatttttttcttttcccaccaaagtatccatttcttttcttatgtcttcaatgcctgagattgtcttttgtcttttttattctattggtaagacttgcctctgaagttctggtataagttcttaaaatttaaatttccagatttccctcagttagggttttgttattaattctgtttttattttcaggtattgaacagttttattcatttttcttccactgttttcttagatttctttactggatttattcatgtttttcatttaaggacctctgatagatatattcatattttgaagtcattgtcttatacttcaactataatgcatttctcagggcttattgtagtaaagttgctggctttagagtgcattgttgatttgtttgtttgtttgttttgttttgttttgaagaaatgatctcactgtatattgctagctggcctaaaactcactctaaagatgaggatggtcttgactttaaagaacatctgcctgcttctgtctccctggttctgatattaaaggtttctgatgccatgcccagatcatgtgaatgatttaagattttaagtagaagataaaaattaaaggaatgaacataaccagaagcctgaacactaaacccatatacatagagactgtctgaaaatgtgacacaaggaagtataaaatattcagaagagaatggcctttgcctgttatccagctgtggctagcctgttggccatatatctactctggcatccctgcttggagagattcatttattcattacaaaaagtccaagggtttctgtgcattctaagccaaatatttacatacttgatttccacaaacagagaattggaatcttgtagtagaaaataccattctcaagggactttttcgtttctttttttttaatatcacatatttagaaatgtccctgtccctgtcatcaaatgcttcttctttgcctaattgtctgaatgcagatgtaactatgcttgactaggaaatgcagaatgacccttgactcttctgaacaagatgtccatggatgttttggtttgaagactaatgtctttttaatcacttagagtctttagaaaaaagacagtgagttaaagtaacatgacaaacaagacagttatattggtacttttgataataggatgcagacctcagcattcaatggatatccatgaatgaaagccacttttgattaaactgcaaaactgaaataaaacagttgagtttgtttcttctctcactcttttataaagagcatgtgtgtgtatgtatgcatgtatgtatatatgtatgtatgtatttgttgaataattgaactaatatagcagaacacagtattagcaggtgcttcaagctccactcttcatcatcaccaagtcttcctcatgaattactgataaactgtactatataactatatgtactatattttatatgtactacatgttctaaatggcttattgccattaaattgtaaaactgaaggtacgtgtagtggctattcctggttgtcaacttgacaatatttggaatgaactacaatccggaattggaaggctcaccagtgacccttatctggaggcttggagatccttatctggatcttggtttgaagatcttgagccatagtggctatggattccagaagattgaatctccgagttaaggaacacacctttaatctgggctatgcctttcatctgggattaaaggtgtggtggaacacacctttaatctgggctacaccttttgctggagacaatataaggacattggaagaagggagtctagctcttgctcttgttcctttgcctgcttgctgcgtgagactgagtaactgctagatccttggacttccattcacagctgcgactgaatcattgttgggaattgggctgccaactgtaagtcatcaataaattcctttactatctagagactgtccgtaagttctgtgactctagagaaccctgactaatacagtacgtaattccccttagtgtttggatcagtacctagggagttaatgctttaagagttgaaataaactcaaaattacgatgtgcaaaatttttgttttaagcaagcattacaagttcaggtacaccaagaattttccataaagtagaaacaaggtaacatgcctgtatcaggaggaataactaaattgtgtttgcaatattgttttattttaaatccctacgcagtccaactatagtggaacattattaatcccaggaagaaggcagtatgaccagattctgaccatcacacatgatatcatgctccttcaatggaaagcaacagaaatgtaaattgaactgaaacacagaaatgggtgtgcttatccaacaagccaagagtcagggtttgcagtggctgtgagcatgtgaatccaggagctccgaagatgtgattgagaattgtccttcctccaaaactgcatgatttcactgaggaaaacaatctaaaaagtgacgaatggaagcagagagtgcagtcatagatcagtgaactggtgaagagcaaacggaaggcacgctgatcagagggtgacaagatccacttaggaagattaaacattagtgatgtgctggcagacatcataagggtgggctagggttataacaccagttggtaaagagctagcccagcatgcataaagccctgggtttcatcccagcaccatataaaccagggagagtggtacactcttataattccagcacttgggaagtggaaacaaaggacagagaattgagggtcacgtatggatacatagagggtctaagttcatcagtgctacttgaaacactatcccaaaaatttgttttcattgttattattattgttgttgttattattattattattattattactactactactactactactactactactattactatcgccgtgtgcatacttgaaaaatcaaatgtcttgttggagtttaggaaaatgtttgacatcatggcagacttaagcaagtaaactccaccaaggaatgaagccctccttgctccatccttgggttgttctcctgtgaaattagatgacacctgcagtttagtgacatgggtgttcctctcatttcccttgccacacactttccaagcctagtcagcaacatccgccataacactgcagaaattcctctcaatgcattcatagccatcctgaaatccctgggaactgtagctcaaccctgaagtacatgccctaccttctcccagcatctcccttgttactaatcctgatgcttgcaccaggggttcttgtcactgagggacttagccatttagcatttaactctcagatcacagaaggaacaagtaagaaagaaactctactgtgactgaggctccttctattctccctcttgccctgagctgctctagagtcccatgtgggctctcccaacagcagttcttagaaaagagatacagtgctgacgttgtgtgtcaacattgcatctatagccttggttctcaaatttgcccttgccagagtactgctttctctgggtttcttttaacaaagtattacaagaaaaccgtgtgtagagggaataaaactgccaaaagcactattaggattacaagaaaagaagctagtgtgtcctagaagtgtgtggtgacagccctcccttcccctgtgtcttctgcaggctgctgcctgctcctgcaggtgctgtggctcaaaccccaggagatacaagatgttcagttgtaaaactgctcatctgcaggaaatattgaccggtttaaagatctgcctcacaattaaggtgtgtgcatagattacccacacagcacctgcgggaaagacagaactaaaacgaaggaacaaagccaacttctcccaagacaaagtcaaatgaaaactatatgccttagctaattctttcatgtcttaatttactgcgaccgaggaagccgctgaaagctgccctagcattgtattgattagaatcctacttaaattccacctattgactttctagcccctgtggaaggttagggaggaatggcactgtccttcctctgtgcattgaaaactgctcttcactctgagactcttatcttcacagacctctctgaagtatttgaaatgggctaagaatgggggggggggaacaaaagcaaataaatgaactaagacccccccccttttgctgggacagccatggtatgcctactgttgcctggtacaccgggtaacttccagcaccttctttctcttgttgcttttccttcattcccagaaggcctggactaataggggaagcagaggcctagcccaggaagcctgtgttttccttctctggcctttcctttgatgacctcagtgtttgctcagcagctagacactagccagaaactcacagccttgtcttgtcacaacgaaaattctttctgttcagaaaatagccatacaggaaatgtaaaaatagtaaaaggcaaaggcgaatggcagcctcaaggaaggaaagggaccctggtaggccaagacacctacggtacgctgtgtcttctgggttcttccctcatcacaaaaactttcctaagatgacctgccatttcatgtgtaaagtcttcagactatacaaatagctcttttcccttccacgaaacttactatcaggatatggtgatgacagtcgccgctgttacacctcccacctttccgctgtagagagatgggactctgtttcagttgcagagagaaggctctattttcactgttcagaaagagaaacagctaggcaagctgacctatgctgagccacaggcagtttgtccccagccctgcaatccccagagtatcattcacaccaaaaaggaggaacacacacagaatgtatggaacagacaagtcgtgatatggtggcttgaatatgcttgtcccatggagtggcactattaggaggtgtggccttgttggaagaagtatgttgctgttagggtgggcaatgaaaccctagcggccttcagatgaagatgtagaactcttaggtcctcctgctccatgcctgcctagacactgccatgctcccaccttgataataattgactaaacctctgaacctgtaagccagctccaattaaatgttgtcctttataagagttgccttggtcatggtgtctgttcacagcagtaaagccctaactaagacacatgatcacaaggaaacaagactggatagtccatgttaacacccaactgaggaactagatggctatcaaatggaagccagagataactgaggatttctttaagagacttcagcaattctgggagctaggtcttaattccaaacccttgcaatctttagaactccagttttaaatatatataaaatctccagacttaggaacaagacttaattttggacaagagataaaaatcaactgcgttacccaatactgcagctaacatgtagaaaatgaaccatttctgtatactgtatgctgtatactcatgttcctatatgttcttttctacatttccttaggaactaactctgaaaaacataaattggagtccaaaaacatttgagatgtaatccttggaagcagtagaaaggccacaggactgagaaggaggaaaaggcattcagagaagctctgttctcactgtgcataagcagagctcagtagtggggcaaacattgtattagtatgttgggcatccatcatccactgtgtttgaggatgctataggaaagtcctaacttccaggaactcccaagtaaggcatcaagtagggagatgcaaatggaagttgaatcatatttcctcctagacagtgatgccacctactacagtctccctaccagaaaaccaaatgtttatcttgattgcagtaatttaaaagaattttccacctggtggcacaagtctgtgatgctggctacttaggaggttaacataggaaatctcaactccgtgacctgcctgggaagcttttgaggcatagtctcaaattgagaaagtgatctgggtggtgtagctcagaggtaaagcacttaactagcatgtctgcatcctaagtctgaccctaagtacagaagaaaacaacaagcagaccaatctccacatactcaaagaagaggccctccctggtccaggctgtccacacaactgctttctttgccagatacctgatgccaggtcacaaacattttgattttaaaaccacggactgtgcatctaacttaagaactgctggaattggttataatggcaaagacgtataatcccaggatgatctgaaagcttaggaggaggaaagtgttgtttcctgcttgtgcttccagaagtctgcagagcagggttcccatgatggatggacagtctcatgacacttgaaacgataggatggttctgtgttccttctcagaaagtttgggagaacacacagctgggactgcctttgtgctttggagtagatgggattaaggagagtgaaggctttgcatctgtaaagtcaggatccatttaacttagacatcatggtcaaggatctaaaagactttgcctcctttgtgttgtggtcagaaccacagagcagtgcactcatgaaatgcagtagagctccctccctgccctctgaaagcctcagttcaaagggtagatctgcacccgggcaatcctaggctccacttgcaaatataagtaaggctgtattttaaaaaagaaaggggacagaggatgatgatgacctcggggtgcatgtctagcatataagggggtgggacagaggtgttgcttgtactagagggaagtggagaataagaaggtttccttctttttttgttcttttggagggtattcgtatggggacaaagttttactatataactttatatgatataactatatagaactatgtaattccagctactgaagttacaagcatgagccacctcaactagcttttaaacaaaaggtccaacctagactgtcgttatctctccatgtcattttaaatggggggggggtgtcttctttaagtcaaagttcatctgtcaggttaaatagccaaagcctctttgacttgtcaagcagacccatgaggagtaaatgaattcgcaaatttgagaatgctttggagaagggacagtgctgtatcaacgttaggtgtcatcattaagaaccttcacaccaaccacatcaacacatacaactcaagaagctgagaaaagtgtagagccacagagagctgtggcagcagggacagggctgacctatgggaaggatcttgagcagatcatataagcattcagtgagcatcaccatgccataccttagcttgtatttgtccatggtatagtacaggttttacagtctacaatgcatagaatggatgatcctttcaatttaggataaaataataatgcatgagaacatgtgtagaccacattaaatacacgattgggaaatctggagaaaaataaaaaagccagaaattttcacctattagatagaaaccaaggtagttaacatatgctatagcaaaacctgtgcccaagcaggaaaataaaagaggaacatttaattattatttctgaaagcaggcagatagatttgggtgagccatgtcattgccatctgcacgtctttccttgagaggagctagcagaatcctcaagggtcatagcaccaggaataaacataaaccaagaaatggcatctcgctgctgcgcttggaagtgatttaagggtgttaagcccttgggcaggaagtgttccagcgacctctgctatcattacccagagagcggggcttgaatgatgatgaatggtttttcatccacctaatcccagtgacatccaaacatatgagtgccagatcctgcctaattggcatttggcacgacagaatgtggttggtgcccatgctaactggcagacactttgtccagttctcccatctcagctgtgctatgatacatgtggaccatctgtcttccaaggcagaatttcccagtgctaaaccactttgaagatatttgcatgcatttggcatttcttacccttcaaaagctaacctgcatactatctgcaaatcccactcacaatgtcacctcctgcttagcatttctactgtccaggattggcataacacattttctattgtgttttacctctcgtctcctagatgtaagactcatagtttgaaggaagaaaatgccggaggagtcctctaaattgcaagcagagattagaacataaattaaatctggaaaagaattttggaccttgatagacaaattcaaatcaaagaccctaatcctcacgcctctgccagatgggtcatttatctgccagagcccagcttcttctaacaaaaagattaaagtaacacatttcgagagataagtaaatcatgggaaagactcttttcctggtcacactcggggctatttttaggactgatgcagtgtaggcagattaaggccaactgtctatataccaaatgtcccgctctccatagtctgcggctcttacttaggacagtgcttggagagatgagtggatagacagagtcagcttcatgcagctctctcttctcactgtccagcatgagctccgggtccagcctccacacttgccactcaagtttccccctcatcctctgtttactgaactgaaaatgaatcactctctcagagtggtaggtggtttgttttatcagcactattattatggtttattctctgttactagaccatgggcactgtcttccatggcagtacaacacagcctgtccacctaaggcacaaatcctccatgttctatgctgtcttgagcaagctcctttctgcagattttgtatctacaagaaaggcatacaggttttagcccttgcccagtgatagtgagaatgggctgagttcattctgcatatggtgagaaacatgaattatttgcaaagcagcacacaagaaacagatcaaaccgatgagcccattcaaaggcaggtttccctcattcatgatcctgcctgcagttacatattagatttcctgtcaaatcacaactcattatctaaaaagaaaattcacatatataaacataaacagccatatcttttgctgaaaacttctcattcacaagcaattctacacccattgttaatgccatgaaggggacatttcctgggtatatgtctaattagttccttatcctattgctgtgacaaaatatctgacaaaaactacctaaggaaagaaggcttggttctgtctcacagcttgagggttctctccatcacagtgaggagggatggcagctctagctggtgtagcaggaacatgagacagttgcccacaatgcacccaacaccagaaagcagagagatgaaagctggcctcagctccctttctccttctcccttttgcatcccttaccctccatcccatggaatgatgccacccacattcagggtgggacatacttccttagttaaatttctgtgtgaatgctctcacatatataaccaaatgtgagttccctatgtgatttttaaatccagtaaagttgacaatgaaggctgatcatcacaagtccatcgcttgtcaacttgacacccagatatataaccttcaaatcccaatattccatttgtggtcttcaagtctcatgtctagctgacaaagaaaagtacattcagcccaacttcaaaagtctctatggtctttaaaagtttcagtactgtttacaagtccatagaagtgtggtgttggccagggaatggtgttgcacgcctttaatcatagcacttaggaagcagaggcaggtggttttctgagcttgagaccagtctgatctacatagtgtgttccagaacagccaaggacatggagagactttgtctcaaaaagccacagccaccaccacagccatgcacaaacacacacacatgcacacacacacgcacatgcacacacacacacacacacacacacacacacacatgtacacatgcatgctcacatgcatgcacacacgtgcacacagtccaaagcctctccttagacccaagatagcctcttgattataaacccttatttaaaaagtcatacactttcaaattacaatgctacacaataaatattctcatccagaaggaaagataagacaaaggaagactgaaaaccagtagggagaacaccaaatcctgcagcttcctgttagaacaggggtctggctggcattagatgggctccaacagccttgggtggacctgcccctctgattctgctgcctccaaatcaccagttctctcttggattgcatctactctgtggctgcacttttccaaggcagacatcaaccattctgacatcttcaacaacctgggatctctatgaccacatagaccttaccttaacagcttcatacaacggcatctaggggccttctttggggaaatccaatcttgtcgcataatgtcttggccttggcagccttctggaaccttggtcaagtctccatggcactttccatgcctacaaaatcagcaccatgtgtaccagtccaccaaggcctaatgtcaagttaaagtatggtgtggctctaccacaggtaacaccatgccctctgtatattttgactatctaatctgaaaaaaataaaaataacaaatgctttcttttaactgtttggtgttttgttttgttttgttttgttttttggttgttgttgagtagagaacatgacctgtaatgttcttgattctatctcttccctttcaagtcaacttacatgtttccaagctggagtcttcaataggtagagtcttgattgagagcactgtccctagggttcatgacagaactccagggttccctttcatggtgatagtgtctttaagaattatagttacttttcctctatctaccttgtccaactttaagcctgctgatactgctttcctagccaagctgatcattttccataactttctgttccttctccctctcttttcatctcccaagctaagaatggtgagcatttgccatgcacatcttgaatattatggtgcctgaaattttcctttctaaaaacctttacttcgtggcaattcaatccaggctccctcaagtcatggtatcaggacatgagtggcatgcaagcacattcttcaccagaatagagcacaatgggctctagcccgcttttgctatagtcctcatttttcttggaaagcttgtgagcacagtctcctctccaatactctgagcattctggtcttccacactcccaccagaatagcccactaaactctgctgacagcagtctccactctacattccaaattctacattccttctacaaatcataaaaataaccccagtcccagttcttattttctgtattaatgacttttctcatttttgtgtgtgtgtgtgtgacaaagtacctgccaaggacagcatgaggaagagtttgttttggtgtagagtttaactgttgagactgtcatggttggggtagttcatctcccagcctagctgtggtaccaggaggatgaggcaaccatttgccctgaattctgtcaggaaagcagctgagatggattctggagatcacctcactatttttttttctctttcccttttcatggtgtctgggccaaaggaaagatgttacagattcatgtggttccgcctccagagttaaatttccgtggggacatctcccattcagatgggtctcttcttggaatctaactccagagtagttgactatgaaagagtcagaagccaggtgtggtggcatacacctttaatcctagtgcttaggcagaggcaggcagctctccatgagttcaaggccagcctcatctctatatcaagtttcaagacattctgggctacacagagagactatgtctcaaaaaaaaatgatcacaatcagagcatgtctgcttttgtttgttttttttcaaaatgtctatttagtgaggaagaaatgatggaaggactctttgtatacctaagtaatgtgccacaagttcagttagagattagcttttagtcaggcactatatattttctccctcactagattatctcatttatgtcaagtatagtgggaatatggtattagactcactgctgtgctcagaatttttattataaatgagaagcagccacttgtgctatatggtccttattgaaagttatatgtgtaagcttctgagtagaagactggagcctatgaatttatttcaaatatgctttttgcttctgacttgaataggaaattctgctagagcaaaagccattaagaatatgcactgatagatccatagcttgccaagagcaatggaatggaatacaccaaactctctgaccatttaaggactgatttaccatattctcaattgtcctagatcctgttttctggtctgttttggtgtctttggataccagcctatgtggacttcttgtattccgaaggagaaggaagctttggtatagcagtgtccataaaaccaagcagatcatgtaaaattttagatagccatccctttccaaaggcaaaaggtttgttgttagctatttttaataaaaggtcaaagggtcatacttgtggaagataataaaggaaatatccagctacattagtgcttagtatacaaagtagatcacagccctaaaatttaccctccctggaaatacctatctatatctacctctacctctacctctacctctacctctacctctacctctacctctacctctacctctacctctacctctacctctatctctatcatctatctctgtggggggggtgtagcatatatatggatatacacttcaaccgtgttttgaactcaaatcgtgacttgacaggagagatttaggaaatgcaattataaatgtgcacatgatttcttgattgatgtcacaagccatcatgcaggaaggtggacattacggaccaacttgattcattcatcactctgtcagaaactcatagttgacagcatctttcataccccacaatacctgttgcatatagatatccctgtgaggttggcaagagaagtcatgaggcctaagtgatttcccaattgcaagttcagaccctgtcttcctcctctgattgcatgctttaagagaaaacacagccagatacctgattgacaatttatccatacagtgccacctatcatgaaatgcttgtaactgcatgttctcacggcaaaatggaaaagcaaatcaatggccacgataagttcctggcaaaaatagatgttttgaaggctttttgggttttgtttttttaatttattccatatgattcaacttcatctataattattaaaatgtatttaacctaatataatcaactttatctaaaaatactagaacgtacatatcacagtagaaacattgtagaacaccaagataagcataatgggatgaacatgcttatctaattatgctaccttcagtccacactaaaactgcattaagagataattttatagatgtgatctagaaagggtttgaactaagaagataaaaaattatctcagaaagttggccatatgttcacagttataatagatctgaggaactgctcaaagatcaaccaagtggcatgcagggaatcaccctgagctattccatagaaactgtaaaagtctcagtaattgaaaatgctgtgttcctccagctgtaggcgtgacaaaacagaataaaataggggttggcagctgttgaaatatatgtcagaatccctatctgagagaacagactaaatgaagataacgcagaataggtgcgggcagagcaaccattttgaaaataagatcacagaccgcaacacatagaaacatgttttccctgcatttgccctacactctgcattttttcgtgcaaaacattagacagggaatcctgaagattagggatcactcccagagagacacaggcagagttttctgcagcgatgcctcatcagccacagggttctcaaacccgctcatcaaatttcattaaagtaacccagtgaatggtttcgttctgctgaatagaaaatataaataggcaatagttactaggcataggaggaaactccctttagagataagggctaaagtaccaacaataaatatgaatatacggcaagagttaattagatataaatataattttatccttagaaaagtaacaatatatattcatctttgaagtaagagcaaatgtcgtttttaaaagaaatgtcagttatcataaattagcttttggatattaaaaataacatagtagaaacacaacactgagaagggaggtgggaatagaactaaagaaatagctaagagtcaaacaaacaagtgaaatattgtatgaatatatatatgatataattacatcatatatatgtgggtacatatatacacacacacatacacacacacatagatgatgcctaaaaggtttacatctgagaaaacaatattctagaaagacgaaaacatcataaaatacatttatgaaatttatcccaagcaggctaataactttcatacccaaccattaccaaagcagaggataaagacaaaatcatatcaagaaaaataattgtgaaagtttcataaattggaggcaaatatactgaaaatttctagatagataaatgtgaaataggacacataactggttttagatgatgaattagaaagatttcaatatttctgacaaccatgctggaaataaaaagacaatgaaagcaaattcataaaagaaaattaaaaattctaccaagagtgctctacccagctaaactaggaagtatgtatgcaagtgaatgtgatccattttcagacatgcaaagttcagaaaatttgacactcttaaatctttccacaggaaactacagagtacaactacaactaaaattaaaatgaaaaatatatccatgaatgagcaagcatagcatgtgagaataaaggagcataggaataagctagaagtaaaagtaataagaatccatcagattctattgctagtagatcagaaggctcccagaaagacttcaagacattgcatctaagagcacttgcatttgaacacattacaatgaggttcaggatacttgtagacagtttgaaggtgtcctacaggtatgggaaaagaaattagtaaatgataaataagacacttattaaactcaggggaagttagaaagttaaaaattgtgcaagataattattgggttattacatgacttgtctctgaatgtatatatcctgtgtatgtataggatacatagccatgtgtaatttcagctttcaattcagtaacctcatttgtgctggggaagtagatataagaaagaatggtgccctattctttcatgataggaagttttttaaaaatatataaataagaaaattattttgagaattagaagtagacatagaagcatcagttgaaacattagcaagtcttagctcctaatcaatgagaaactggggtgcttatttcttgtttcattgccccgagacaaatcctttttagaaagcagctttataaatgctgtgaattgagaaatccactctcgacttccagaccatgctgatgttcatcatgtcattcccccccatccctcctcatttggaatttcacgaatgtgtcaaaagcaaattatgcacatgacttgttggtactccttggagattctcttcactatttacccttggtctctcttcatgtcttcctgccaagctcagtctaccagtaatcaaaattccagccctggtcagcagaattgcggctatgttttcatgggtctttttgtatatatgagtgtttttgcctgtatgtgtgtcggtacatgtccttgtctggtgcccatggagactagaagaaagcactggatgccctggaactggagttacagatggttatgacttttctatggatcttggaaacggagcctgcaggagcaacagtgctttaaaccagtgctcataacctgaatgtcttcgaaggcaaggagctggtgggcacatctctggtttctgccaatgcagggcacatagagatgggttcttgataaaaatgtttattgagaactgtcagcaagaaggacattagttttcatgtgaattcaagacgtcttactcttcctggatagacttgaggtgcaaatatctttttctagatgcctggaacagaagagtcgttccagaaagttctgttagaaatagtctgattatgtgctaataagaccctgatattggagagtcagtcaaaaaaatttttccatacaccagagttcctttccatgagcataaatcatcttccttttccattgtccctcaaggcccatgtcatgggctcagactgtgcccttgtcctggaactcctccagcgcctttccatatattatttgggtgaactacacatagctgaatgacacaccactgtatgtcagagcacctctggaagatgtcagaatgccacagataaattttgagtttcagtcttcctaatcctacaggaagctagcagaagaatgatagccactgtctgtcccaagggtaagaaagacccaaatagagggagagtgtggtgcatgtccatgacctcagtgcaaaaccatatgacattggagagtttatgacaaatatgttgctgcataaaaatgaccagacatttaaatgacccatggggaccatcatatggtcaagtcactttcctctggggtctctttaaagatggttcctctctagtgaagccatgtctattctccctttgcataaccagtttctttttccactgaacatagcgaacactgggtttcttctgaagagcttcatagagcactgttatattccattccctgagggactatgtttccctacattggctccaaatggtgtattagtttctgttctcataaataccttaaggtatattttgtgacccatatggacaatgtaaaatataccagtctctattaaaaaaaaaacatgttagggaatttatttttcgcctttgtctttgctttttaaactttatttgcaggagaaaacaaaacaaaacaaaacaaaactgtatttatctttgttccccattgtggcctaatgcttcatattctttctgatatgggctattttattttacatcatctctaatatattagcccacttgaatttacagaacttgaaagctggaaaaacaatcttaaggaggcctgtggttaacaagtccttgacttacggctggtaggaatgtgcacactgtcttagctggttatgaaattgtttagaaagacaatgtgtttccatttgcttggtggtttggttggtttagcgtgtgtgtgtgtgtgtgtgtgtgtgtgtgtttgtgtgtgtgtggtgtttatgtatgtgtgcttgtaggaacgggtagaggtcagagaacaactccccttctaccatgtgtatcataggaatcagactcagctcaggcataaagcaagtacctttaccctctcagtcatttcacaggctcttgctttgctttgttttgttttgttttacattacttggggggactgaactcatggcctcctacctgttaggcaaatgtacccccacacacacacacacacactgaattacagtatctagctccttcctacatcagttctcaatattttccactttctgtgttactctatggactaagaaaataaatggaaaattttcacaaacaataaaatagttgtttttttaatgctgatgtttttaagtcaatgatggcagcattcttcctctgtaggttacatggaagcaaagaaaatctaagtcttttctctgtccccacaccttggccagttaaaggcatctttcacacattgtacaaagtatgaaatatgtttgaaattggactcctgaccctttagtgacataccttctatattaggcattgactaatcctaattttcacagtggcatctcttgactttgccaaacctctacccattcacttggtgcatcaagaatcttgaatacttgttattagcacataaagttctggagtggaaagtatctgatcactcatgttcttcagcattttttgtctggccattctgcaaacctacacattgttgttattcaaatttaggtaagtataatccagcaagatgtctcagtaggtaaggtcattctcctactgcaagcctgtcttcttcgtatgattctgagaaccctcggtggaagaagagaactagatcctggcacacacatgcccacacctgcatccatacatatacacactcactaataataataagtaaaatttttaaaataaaattagaaaatgcccttccctagggatttttggtttaacatagataatcttcagaagcaccaactcatctaaactcctggatggttttctgaccgtgacctgcattttatattatgctaagggtctgcaatcatagctcagggtttcagtgcctgcctgtaatgttcataatgagtgaggcccttgattcaatgttcagcaccaaggggggaggggggggcggtgaagcaaattaaaatattagatgtctatgaaacaataaaggtaaaagattatctaaaagtcagatatctagattcttaactagatttgtatttaatttagcaattttgcctatgtctctgtttaattttggtatttggcttggtttttactgacaagacactaggcatatagcccagtggctgaatacttgcttagcatgtgtgagacactatatccaattctcagtatgaaaatttgtaaaaagtaaaggggcagatttgcctattttaattattaagtttttaattaaaatttaaaaagatttgtcagagctggagatgggggctttgtatcctctaggcctgggtcatagtgtaaccacagactaagctgactgggatccatcaaaccgctgcccaagtttggttgctttctgccttccagctcccagagcacattagtccttattctgggtcatatcctgaagacatcttttttccagtccataggaggggttggaattagccctccaacattccagaagccctcataaaagtagacatgtgcccagcaaaaaaaaaaaaaaaaaaagatagctacgtaatcgataaattagatagatagtattttatatcctcttaaatgtgtttttttcatattcctgaccttattaatgaaagaatgaatttttgtaaattacccattgatttgaataataatgatttcattggaaaatgacatttgtacattatgcagccttcattttgtgttctgtattcaatatagacaaggaaattattcacaaacaagtttcaaagtctcaagttaatcacagagttcagtctcaacacaggctcccttaatgaggcagcaatgcatacgttgagatgctgaccttgcgtttgcctgggaagatggctcaaaggtgacagtctgcacatactgcatttgtggaagactagagtttggttctgagccccacaatgagtatctcacagtcacctgtaagtctgtctctagggactctgatacctctacctctgtcagcactgcctcatgcgtatacacccacatagaaacataaaattcaataaattgttcttttgaaactaatgtgccacctctaacatagtgacatatactttataatgcttttgttttgttatcacagtatcctctattggtacatttcatattctgttaaaaggaatgtacacccaagcttccactaacctgggaactacagtaaacacctacttcccagcattcacacccacccagaagttatattaccatactttcctagcatggagttaacttcctggaccctaagggatgccccaatgagagacagagttgtataaagctgctatttgcatgggataaaaagaccaaatactattgtcctgggtgaccctctactttcagagcaatttattttctaatttgaatgactctaatcacgtaaaagaatctgaccaggtgcagagcatcatggaagacaccaggaatggcagagctggagctatacacgttgttatggcaatgactgttcaaggggtggagaggtgtgcccttgccagaatgtgagctctttgaaggcaggctcttctgtctgcaattcctgtacttttatctgtgtatgtagcacatgttgaataaattgggtttgttaaaatttttattaggtattttcctcatttacatttccaatgatatcccaaaagtccccccataccctcccacccccactatcctacccacccactcccacttcttggccctgacgttgccctgtactgaagcatctaaagtttgcaaaaccagtgggcctctcttttctgatacatatgcagctagagacacgagctctggggggtactggttagttcatattgttgttccacctttagtgttgcagacccctttatctccttgggtactttctctagctcctccattgggggccctgtgatccatccaatagctgactgtgagcatccacttctgtgtttgctaggtcctggcatagccgcacaagagacagctatatctgggtcctttcagcaaaatattgctaaggtatgcaatggtttcaacctttggaggctgattatggggtggatccctgggtatggcagtctctacatggtccatccatttgtctcagctccaaactttgtctctgtaactccttccatgggtgtattgttcccaattctaagaaggggcaaagtgtccacactttggtcttcgttcttcttgagtttcatgtgttttgcaaattgtatcttgtaccttgggtattctaaatttatgggctaatatccacttatcagtgagtacatatcatgtgagttcttttgtgattgggttacctcactcagaatgatgccctccaggtccatccatttgcctaggaatttcataaattcattctttttaatagctgagtagtactccattgtgtaaatgtatcacattttctgtatccattcctctgttgaggggcatctgggttctttccagcttctggctattataaataaggctgctatgaatatagtggagcatgtgtccttcttagcggttggaacacctggatatatgcccaggagaggtattgcgggatcctccagtagtaccatgtccaattttctgaggaaccaccagactgatttccagagtggttgtacaagcttacaatcccaccaacagtggaggagtgttcctctttctccacatccttgttagcatctgctgtcacctgaatttttgatcttagccattctgactggtgtgaggtggaatctcagggttgttttgatttgcatttccctgatgattaaggatgctgaatattttttcaggtgcttctcatccattcagtattcctcaggtgagaattctttgtttagctctgagccccattttttaatggggttatttgattttctggagtccaccttcttgagttctttatatatattggatattagtcccctatctgatttaggataggtaaagatcctttcccaatctgttgattgtctttttgtcttattgacggtgaataaattgttaaataaacagaaggtgaagaaaggaaagaaagaaaagaggaagagaaggatggagaccagataaaataatatttagcaagccacagtaatcacagaaaactgaatgatttggggggggatgaatcttttatgaaatttggtcttaagagttctatcaaaaatatttttgaatcatctagagaaatagctttggcactaagctaactggtttactttataaaatttgtgatctgtcgaagggatgtatgcattcccacattaaggcttgttttggtctttctgatgtacatgtgaccagggtggttgctgtgttaaatgttgggtatttgaaagtatagatgacggtgcattttgaaaactggtcatagacaagcatagcctgcaggcaagtcgctactgtgggtcacaaacgtgtcagttaaagcctttatatcatctttttcatctccaaataagagacctgttgctacttctccttgtcatcttacaaaaaatgatcaagacccatggtggagtccagttttagcagtttgtggtgcaaatacttgtttctattcaaacatttgcttagatatttctttctgctctggcaaagtaatttagcactggtgcttgatgaggaagccctgtgacttgtgttcagcccctgaaactcatgcaaagaaagaaaaaaactactccacagagctgttgagtcagccccacatgctccatccaaccccctgcatcatgcatgcacacagacaacaatgatgatggtaatgataaataaaaatgaaaaaatgaacatatttctttcatagaatagacagtttctttagagagccagtagtcaagcttcattcattcattcctgaataatattaacattgatttaactataatattcccaggattttgtatcagttgtcttgaaaaatatattaggtgtgaaaaaaatttactgtagtaaaatgttatggttaattttactgtttataaatggcacactcttcattaaaagctttaatgacatatatattctaaatcaatagctctgttcctgccagtgcagctagcaaaaggaattaagtatgtatataaatatttaactgccatagcattcaatacagtgttgtttatacttaaaaatatttgaaacagatttagtaactgataatagtagattattgcttaatcttttattttatgttttattatatataaaatataagtagctgtatattttaggagttcaagttaagcactgatcttagagaattttgtgataataatatttataacatattgttcatttaattcagaagaaatttctgaactatgtcagatatatatgcatatatttgcaccctattaaaatgcatacacacgcatgtatatgcatgcactcctacctttttgatgatacacagcaaagcttctaaagtccgttctaaaggaacaagtacatgtttagaaaagtatttgttttctctctgcttatcttattggctaaattccttctatgaagatatagcacttttaaatgaaccataaaactgttctaccaagataataagatatgctacccctaatgtttaccaacagcatccttgtttcccattcatttgctgttattttgaagcctggactgttaaagttgaagaaacatgctgtggttaggactctgcatgcctgcaggggctgaggcgaagactagggattatcttggtccttgtaatggggcttcagatcatgctctgtaaacatatgtacgattttctatctttgaattttatatccggaatgccgaaataaaaaaaaattgtttcaatatttagcagtatctacttcaaaatgttgtaagaaaaggcaagtctctgggttgaatcctcgtgtgaaagtcagatttttctatctggagtaaacttgtaaatacaaacccggagctctcaccttcccttccctatgctttcagtttgttatgtatagcacacgtcgcgtgttgctatcttcattttgtctaagggggaaatgatttgagcacttttcatttaaagttaaataattattcattatttttattataaaaataaaagcaatttatagtcttaatggaaaatctggaaagccatctcaaggtgatttacccagagttaacccttcttttttaatttatgaacttgatgttcgctcacatttaaaaggagaaagtctgtgtttaaatcatctgagaagtctaggaagcatcagaattacctctccttaattctgggaggaatagtggcaatacacagcaggatcctagacaagtgtgggtccatattaagacaaaactatgtcctctgtcttctccttggatgctgcagagaggggtttgtttgtttgggatggatcagtgcaggctgaccccacccataacctccggctgagcctctcacatgccttgaaatctattttctccagggcagatgtcagtggatggattcatgcgctacctgagcggagaagaaaatggagtcgtttcacctgagaaactggatttgaacgaagacatgtctcagcccctgtctcactatttcatcaattcctcgcacaacacctacctcacaggtacgacgcagcaatttctgttcttcggcagatcccaccaggttttactttcttgtgtttgctgatggaaaatgaatgtttcctttgtcctgggcgtggcctctggggacttgagttgccttgctgacctctctgggtgtatttgtgaagttgggccatctcctctgtacagtttgtgttgttttcaagtctcctagactgtagcggcatctgatgttttctgacccatggaattttgtgtaattggagtaagtgtacagtgaacttagaggcatttccaaagggaatacggttcatatgcctgttaatgggcaggaagccttgtcctatacccaacaccacaaaaaatgaacaaagctaccgacaaccctatctggttctctgtgctgtattcatctctaagggctctgagacccctcagaaacttcggtgaagcaaatgatttttcatgcaaggtgaaacaaggctttggataaataagcagacattttctaaatgacagatttagtatcaaatatataataaagtaagagaaaacagtgtcttacattgatctgaaagtgaacattggcaaggtttttggtaaatcatcagaaagaaacaagtttttatctctaataacaagctttaagatgtccttggagaaaagcagctgcaggtttaaaaaagaaaagaaaagctttgaaaaacaagcatactactttccatgctttgtaatcctatcagatgtaagacaactgaagtctgtagtatcctatggtgtctgaaggaggcagataggcctcataccttcaaggttgtatagacatgctggtggagctggtctgggcatggtcagtttgtgctgcaggctggactcatactgatacacataaagagattcaagtactggataggcatatggcatgtaagaaaatgtcaatctactgatgagtgacaggtcagaagtcatttctctagacttccctaatatatcctttgctcccatctcaagtacatatgtacactaagtgagaaacaggcttgagcagaggtagcaccataaccttgagacagccagaatagtctatctcagggtaatctacacagtctaaaaccatctagccagagcaaaagtatatgaattctacagcactgcagtttagaggcttgtgacaatcacacagcttgcataccatttgtgtcccatttttttactactggtgttgtctactaagaaaaactcatatccacaaaattaagtgttgcctcattctagtcactcatctcagcaaaccaacccaaggcaatggtataaaataatacccgtactgtgtcaggaatttgaacagtgaaggaagccacagcgcatctgtgttcctagggtgtctcagatttctcccgggaatagcatcaggatgtgggagatgacgtaaaccacttctgtggcggaaccttctcttactatctcctacatgtctgccagttctactgaaatgactcaaatctgtgaacctgttgtctgaaagaggcttcactgcatagcctgggtttccctgtatcatgacaaccccaggaaggtagccttgcttcatggactctgcgctgccagaacaaacacccaaaatcaggagaaagtttacctaccttttgcaacttggtttctaaagctcagtgggatcgattatttccaccatttgttggaagtcgtgagtccacctgggtccatagagaggggacatagctaggccctcagtgggaaaatctgaaagagttaagacctgctttaagaccactgtcggcctcataaatttaagaacgggatgcgcagagacagacagatctttacaattccaaggtcagcctgggtctatatagcaaatgccaggacaaccagggctgcatagtgagaccttatctaaaaacaaacaaacaaacaaacaaacaaacaaacaaaaacaattaaaaacataaagtcattaaaaaaaaaaaaacagaggaaaacagtgtctactctgccatcttcttcagactcagctcattaagactactactaccagtactactacaaacaaacaaacaccacacagactcaaccatgtctatcacccttttataaaggattttccccttctaaatgggttcttaactttgtttggtactattgacctatttgtaaacttggaggagattatggacccttcttagaatgtaaatatatgaaataaatatctagcattaaaaagaaaataaaattcactgatattataataagcattaaaataatttatgctaaagtaacttatattttagctagcaaattttaaatgcatataagcactgtgtttttttatgtgtgcaacaattggaataaattgttaaatagctgtgatttctgttagtaacaaagtcacagatcttgccagtgcagccgtgacttgtgacctatatttacaagtggaaagaaggtcacaatttgtgtggatgacattttttctaacacaagttcaaggaagtgtatcaaatgccaaattaaaaatacagttgtagctttcctgggtgtggttgtacctgcctgtaatcctacctagcactcgagagacaaaggcaggcagaattccgtgagttccagaccagccagacctatgtggtgactgatgcctgtctccaaagtgaagagggagagaaaagaaaaataaacttttaaaacttaatccgaggaattgtaacttgaaaagatactgcttgcaaccaagtcttgtttttaatcacatactttaaaaaaaatgcgtctaaatgttatacacatggaactttcaatgctgagtgatgtagtgataattctttgatatccaatcagtgtctccagcgttttcatttctgtttttgtttcccgtgtgtctgcgatggcgcagtgattatgcatcaacactaattggatatgcatcctctcttctgtcatcctggagtgtatcaccccgtatctttctgcacattacatggatgcgtggccctccttggatgatttgttctctcacccacagcctttcccctctgatgctcaggtggctctgttgtcccttttagggagcttgttgacaggacttgtgatcttgaaagatgccttgcctttgagactcacctgtagtcaggccgaatcagactccatcttcctcatccccgaatgctgccccctcccccagacacacaccttcatgcacatacatacatgcaagcacgtgcacagactctcaccatgagccctggtccctttttcttgggggaaaaagtactttgatagcaatgtggaccctataccatgaagcatcatttccaaatgatttttttgacaagttctacccaaatctagaaaagaaacttcttatttgttacttcttggggtatgcttcacaaagatatttctacttaataacttccaacataaagttttaattctatagctgagcatccatcagtaattttagtatgccactaattacatatagttactgacaaccctaataatatgccattgctgatgatatcacaatacttataggaaaattattcaatattgaagcacacagtagtatagttcaaaatttccttgatggtttctttttataaatgcatttcagtaaagtctcttctacacgagttaatttcttagctatcacttataccttcctccctcggcataactctgtaatttgatcacagagcctgagctctagtatgcctggccggtgcacaggtttcagtcaaatatgaaaacagagctacttttttgtctagttatacctttcttgagggtgtgcctaaagaaacccatctcagcatacaagagacgttcctggacacctatctgtcctgaggcactgtattgtagcaaggatctgggctcagtcttgctaaagcaaacttggtatctaaacacaatggagtaccttggactgtaaagaagaacagaaagtgtttttctcaagaaaatgaatgaaactaaagattaccatgtatgatctgtgaaatctatactttaagaatgcacactcaaagccagatggggcactactctgagagctgaaaggggactaggaggaaggagaaggacaaaaggacaagagaggattaatgggacaacgaagatcaaagtataaccatgacaaccatgaacgaaattgtgataatgaagcccatcgttttgtgcagtgattgtacattaacaaaaactgtaaaggaaaattgcacattaatggctaacagttctgagaagttatgatctttagctgttagaaaatagagggattcactctttcccttgttttactaggcaactcggagcagctcatgctaggcaaatgctctaccactgagtgacacccctagccctccgacttattttctgaaaaaaagagttcaaaccagccccttcccggttagctatctaatttacataacgtgatttctgattaattccaactcattatttgagtctagtaacatcagttgttgctagcttctgtcatggacttgaggagtctacttgatgtttttcttgctctgtcttttcagctattatcatgccattgtttgcattgcacagatttgaattagatcaaagactttctcaccacattacacttttcaagtttaagacaaagtattctctcttcagtgggggaattgaagagaataacatataagcaggaggagaggggaagaagggaggaaagaaagaagagaggaaaaaagagagggagagaagggaggagtgagggagggaacagtttccataggctttcagggttttgcctgaaaagcccttttttgatgtatggttcaaaaatatgcctttgtttcatatactagtaggagggctgctgctttaattacacacaaaatgaatacaacattcctatttcccagagggctttgataaacgtgaacacctctgttatagaaattcaagcaccctcaaatgaattaaacatatgtgtgtgtgtgtgtgtgtgagagagagagagagagagagagagagagagagagagagagagagagagagtgcattcaaaccttaatgcagtatccaattaaatttgaaaaccaatagctaagaaataagctagattttcaccgaggatcccaggcttctcgcctgtctgttgtcttggattctttcaggtgcatacccatgcttcatttccactcttagaacaaataggaactttacatgaatcttatttcttagcagtggtatgcttgtggtagcacaaggagggctcctgttcacacgagcctaagcaaggctgggcacaaggagagggtggcactggtaggtctatgatcttactctaagtaagacagaatgacccgggtaatcccaagctaccctgtccccactccactttccttggtgcaattttagaacttgtatttctgagccacccaatccagtccaagcaaggaaactttcaatctgtggattgtttccttctgtatcattgcctaatttatagtatctttatcccacttagaacaaaatgcaggagtggagaattaatgatgaaaaatattagatttacttaccccaataatctgataaattaaattatctcattgcagatctcaaatgattagtctcctcttccccggtatactttcttggctgtaataaaaacctagctgttccttgtagaccaatcattcacccaagacttaaatccacccacccccttctttcctcattctccctctctctagactgtagcatctgcaagcttttatcatttttttaattacacacagacctaagaaaattgagtggtggaataagcttaggaaataaataagctctgcttgaatttacctttaaatgatactcttaccttggctgctttataaaatgaagataaattaaaagagccagggttcctgtggcagaacatgattggatatgattggatactatctaaatgacttaaagaatgaggaatttataccgcacacagcagaacagcagcagctgaggcttggatcaatggaaaattcatgagtgtcatcaattacttcctgtctttcgggtctcttatgatttcagattgactgtgcaccctaagaattggatttctttttttttttagaattaatttttttattaggtattttcctcatttacatttccaatgctatccaaaaagtccccaatacactcccccccccacccccctacccacccactccccctttttggccgtagcgttcccctgtactgggacatataaagtttgcaagtccaatgggcctctctttccagtgatggccaactaggccatcttttgatacatatgcagctagagtcaagagctctggggtactggttagttcataatgttgttccacctatagggttgcagatccctttagctccttgggtactttctctagctcctccattgggggccctgtgatccatccaatagctgactgtgagcatccacttctgtgtttgctacgccccagcattgtctcacaagagacagctatatctgggtcctttcagcaaaatcttactagtgtatgcaatggtgtcagcgtttggaagctgattaggggatggatccctggatatggcagtctttagatggtccatcctttcgtcacagctccaaactttatctctgtaactctttccatgggtgttttgttcccaattctaagaaggggaacagattgggaaaggatctttacctatcctaaatcagataggggactaatatccaatatataaaaagaactcaagaaggtggaccccagaaaatcaaataaccccattaaaaatggggctcagaactgaacaaagaattctcacctgaggaatacggaatggcagagaagcacctgaaaaaatgttcaacaaccttaatcatcagggaaatgcaaatcaaaacaacactgagattccacttcactccagtcagaatggctaagatcaaaaactcaggtgacagcagatgctggcgaggatgtggagaaaggggaacactcctccattgttggtgggattgcaagcttatacaaccactctggaaatcagtttggcagttcctcagaaaattggacacaatactaccagaagatccagcaatacctctcctgggcatatatccagaggatgttccaaccggtaagaaggacacatgctccactatgttcatagcagccttatttataatagccagaagctggaaagaacccagatgcccctcaacagaggaatggatacaaaaaatgtggtacatttacacaatggagtactactcagctattaaaaagaatgaatttatgaaattcctaggcaaatggatggacctggagggcatcatcctgagtgagataacacaatcacaaaggaactcacacaatatgtactcactgataagtgaataatagcccaaaaacttaggatacccaagatataagatacaatttgttaaacgcatgaaactcaagaagaacgaagaccaaagaatgggatttctatgaatgatatctacacctacttctgtggaagtccctgacttagagccctttgtaagagtgtttagaggacactccaacccattctcccagtccatccattagtcttaccattattcctagcatgtatcaccaagttacaccatacagcagaggtatgttgtaactcagaggtgtgttgtaactcagaggtatggtgtaactcaccccctgggaatggaattttgccttgacagaatgaggagattctagattttttttccatggctgagagtgggtcctaaaacctattataacctaaataatattctataggcaaggagatacataagaaagagaacgagaaagaaagattgtgaggagaatttaaactccctgctgaacaaggaaccatcataattcatattccctcccctgcaagatgataaggttaggggtgtgccttatttttgcattcccagtaaccagagcctcccacagagagcatgtttaggaatatacacagagctgatgatatgtctgtcaacagtaaggcttaaggctaaaatagattttctcaggagaaggaatcttccataccgtcttgcttagtccttcaatatcacttgaatgtataatcaagagagctttgtattcctagtgggaaaacagccggtgaattcaatatattcttgataacctgaactgctcccatacatgcagctgtgaggacatatgccctgacagagtgtcaaagaattgaaagtaggcaaaacttgtgtccatctccgtttattgaaggtgacagtgtttgcagaaggagaccactgagttaacaagcacatcacattctagaagcatcttcatttggagttgaagggaatcattagacaatgataagcataaagatagacagcggtttgccatgctttaaatcctgagcaatttcttagaagtttgtgtttccagtttcaggtcttttctatccccacgtgccttggtaatcagagtccgagtcccagggactgtaaccagcactgccacaagtaccaaaggcaaggaatccactgcagagtgacttgaggcattgttataaatccatctgggaaagaactgcagcttagagcccagtcacaaagtcagagagagttgcagagaagtgttcatggtcaggcagagatgagttcaaggaatgattccagaaataccaaggcttaaatggctcaggatatatcagtgcacttagcccccagtcatatggaagtgtaacatagtttatgaagagaagtaaagaatttcagggttgaaaataaagtaaaccagagaaaaagagagaagaatggaaattatatcatatccaggggaacataatagaaattccagttccaagtaatgggacaattgggatatgggttttctctgtgctttctttgaagatttccatttcttattttaaaaccaatgttcgttttaagaatgagcaagaaattttctttagagggattctacaggctgtaggtgatggatggcaaacccaagcagtctttaatgtttctagattacttttcatctcgcaaaccccacaccaagaaagtgcattcaatttcttctaattgttctttgaatgacaaatgcattggcaagccagttcacggaaatggttttaagatgtaccttgaatcacttatgacagagtactccagttttactcagttactgtcgacataaaataatgtctctgttttgaaggagacaagaaatttttgttgtgagccagatataagtaagcctcccccacgaacagggccctgaattattggttaactgtagaagaggttgtatgaactcttggtagccaccaaacaaaagggaagttaatcagcccgtgtcccaagtacgagaacattgatgggagcctaatggggcagggtggagtaagggggtggtttctgctgtgggttcatatgttatcttatggaatgcttctcactgggggtagtgaaggttggaggtctactgtttggctggagatactggtatcaactagtcacagcttttgagatctgatagagaagaggtaactaactggcctatgactctaaggagctgaggcagaaagcttgaaatcagggcaagtgtgatcctcacccacaccacacatacacatccatacacaaagtaaaggtatttggctaccaaaagacctaagatagccctggataattttgtctttggcctcacaacaatccatctctccaccaccatgacatgtgtagtctgccaagaccaagcactctgcaatatctgatggttccagaaacttaggtgtattccacacctgttgtgtcaagtattgtcaagaaaattaagggtcccttctcatgcttcttggtcatgttaataacagaatggactcagaagaaagcttgaggacaaatttattagagtttaaagcaacaataactcagaggtatggacgagcaagctgtaaatctcatcagctgccctcaaggagggagatgaagaggtagacagaatatatttgtcagaaaccatattggggtggagggtagggatgggataacttttataacaaaaggacgagaaagctccgagtgccctagagaacttgtccaggttttgccaactgagataacaagaagacaatgaaagggttacacatcagaaaattaggcagcttaacaaagtaccgactatgtaaacattatatgataacattggtgtcattagtaatacatctttcacaaccctcacacaattgtctaagtttactgtggctgtaaaaaatatcctctggcaaaaacaacttaaaggagcacagatcaagggcagaagtccgagttatgggaccttgaggcagccggtcacatggcaaccacaatcagaatagaaggatgaatttagagcattgctcagctccagtttccccccatcccagtctagggatgatgctgtgttagtcagaattctctagactctagagtctacagtaatagaactgagagagagagagagggagggagggagagaggnnnnnnnnnnnnnnnnnnnnggagggagagagagagagagagagagagagagggggagagagagagagatgggacttactagaatgactgacttataggctacagtccagctgatccaacaatgactacctgacatgtaggtattcagtccacaaggctggctatcttcagtataggtcagaatccctaagaagtagactctaatgcccgtgaaggaatggtcttgctaacaagggagagaggaagcaggcaaagagagtgagctcccctcttacatgtccttctacaggcttccagcagacggtgtggctcagattagagttgagccttcctacgtgaaaagatctcaattgaagctgtgtcttctcacctcaaaggattcattaaaagtgaatcttcccgctcccaatgatccaattaagcaaaaaataaataaatccctcgcaggcatgcccagccatttttgggttttagttaattctagatgtagtcaggttgacagccaagaatagccatcacagatgctatgcacagtaggtgggccttctcacctcaattaacagaatcaatgtaattccccacatgcatgcccagccgtctatctcacagatattctagagtctataaagtcacaataacagcacacattcagatctgccctgttttatgcaggaacaaacgttttgacaaatcaatcttatgattctttcaattcttcatttcccatagttcagaagcttaggaataacaacagtgttaattttcactgcccctctgccttgtcctttatgcagcagatatggggacagtgtatcacaatgacaatacactttgaggccattataaatgacaaattgattgtccagcatcaggagtctcccaggttactctgtcagcattattgtttttgcagatacacttgtgtgtttagatgccctatttttctagtaaagaaagtgattatgcaaatgtacttaatcagcctttagctgcctttcctagagctgtatagcaccgaagagggttgtccttttgttctgttgatggtctggtagtgtgccatgaatataaaagtaaaattaagccagttggcctaatctcgttttctttcccctgtgtgtctccacagggcagatgctgtccatttcaaagtcactttgacaattttttttatcaacattctacaactggctataaaagagatccaagagatcaaggggggaaaacattcagtactcccaatgataaggaaggcgaggcaggaagggttttaatttgagggtaacctagactaaagagtgagactatgattataaatagagaaacaaacaaataaataagcacacaaacatagagagagagagagagagagagagagagagagagagagagagagagagagagagagagataaaacataaaggtttggaaatcaaagacttcaattcgtatgtttgataatagacttgtttcaaatgtatttattattaatatttttaaacaattctatcaagaaactagtggctgccaggactagagatgaatcaatggttgagagcacctacttgtcttacagaggaaccatgttcatgtccctgttcatatacggcagcccataattcgccacctcaactccaattctaggggatttgataacatcttctaaccctatttgtggtatacatacatatgtttacgcacctacattcacattaaataaatgaatacataaatagtttaagccacggcctctgcccttggccttcttatatgcctttattgtcacaatttcataactttgtgacagagatatcgctctggattcttgtcatgagtttccttcctaggaacacagacagaaatgtttgtgatttcccgcagtgtccagaattattgagtcacaatcagctcacgtgctgcattatgttgttggctgcaatttgccgagtagtcttgattttctctgatggctggatattggcaatcagcactccttttattccgatcttaattaatgatattaactctcagatcacatactgcttatcacgcagcaaatgtcgctgtgtacaggtatatatggaggtcacagaatggccacagggggtaaaggggcctcagttgagtttgaggagttcaggggaccttgttaagaggcagaaaaagactgataaaatttaaagagagtttatacgggactcaggaagcagatcctgttggaactatgctggaggtgctgatgtggagtcaagcacagagtcagagatagtccacaagagtcaagctgctgaggtgagagacagggccatggaagccacagtgataaaacacaaggcccggtccatgtgaatgaatgggcagatgacaagtcaaacatgctgcctgagcactggagactgagccgaactgaagcccctgagagagtcgagtgtactctgtcagtctgtccccggagcatacaccaagccaagtcaacagagttactgtcatcatggtattaatgaggccattattgtattcttttctcagtctgatgtgttcagtagattctagtgcctgttttgactgatgtgattttgatatacacatctgcttataggatcccaactcatgttaataaatccatagggcagcacccttttcataattgagaataagctgtgtatcattctctgcttcgtgggtggtacttgacatatggtggtattcatatgttaatcaaaataagaggcttcccacctttccatctgctcttagatgggagtagaggctgtttgtaaaatggaatctcccaggacaagactcaacctgaagccaattccatacaggtatggaattaacacagagcaaggctaatttaccagattctcaggtctccaatccaggggacttttgtcagaagaattcagacaagacactcagagcacaatatagaagatgggtggaacttattacaaggtacataataaaggacagagggaagcagtctccagcagggagggcaacagccatagggaccatgtgccaatctccaccttttaggtagactttgtatggttttccgagatgttatttctccaccaccagtgaaatgagccaatttaagccagattagagtatataaaaggcagtttactgggaagctgctctcaggtgggcgagttcactggcaccaaggaccaaagccagggatgtcaccatggggaaagggggttagtaagggagggacacagaaagagaaaaggggctgcatgcttggaggaagaagaggaaaggaagaaagagaccaaaatttctgtattatatagaagaacctctggggaaagaacagcccagcccctgtgctggaaagtctaggtttgggggatagggtatgccaggttgagatactgtgagaacctggagaccagatctgctttggtgtaaaatacgcacctcaatcccttgtcccagggtggaaaccaaatactttcgaaaatctctggaagaaattccaggaggtgttctctgttcgggtgactgacatggtcatgagagtttattttgaaggaagtaaactagtgtcttttttttttttttttactagaaagccactgacgatatagcaaccatattatattttggacagtttagaaagttttgactccacccaaggtcggactctattcttttgaccaaaaaaggaagaaaaaaaaaccccacataatagaacagatttaaatgaactagagaaaggtaaaagaaaaagtgaacccatagaagtcatattttactaggaggaaatagctctccctcgaaggaccctgctactgcttccttcctctctgttgtctgacctacagtcatcacttcatgtggtatttgaaagtgttgaggggcatctgttatgctttctttttctctcaaacagcatttccagttcgagggaggggcaattgtcatacttcccccgtcctcaaaaatccttgaaaggatacaggaggtagggcccaagactaattatgctggtggggtggagcctgcttagttgtaactagctacataaccgcttcactaagatatctcagctctgctctcaggtttcaatcttacaaagttttcctattgttccttttgttgcttgtgctgtcaggtgtccacacagccactggtgattcctatgtttcttcaaagactttagtacttttagctcttctaggtacttaatcaatttcacgttaaattattctatgtggtatgaagaaaggatccagttagttagttagatagttagttagtgttgcatatggctgtcctattggcccaggctaattcattgaaaatactaatttttctgtactgagttgtattggtaagcctgttagaagtcagttgaccgtaaactgaaggtgtatttctaaaccttcatttccactgcatttacctgtgttgttcttcctatagtggcaacctactgtcttgattactgtaacttggtagtaaatcctaaaattggaaaatgtgattcttccaactttatttatggtttttatttaagattactttggctaattcagccccactccccctgttatgatctatgggaaaggtactataaagtcacaccgtgcagcagatatcacgtgggaggtattttggggaggggctatacagaggttgcctctgagcaaggttggagggaagaagagagtggagagaagagaaactggccttttataaggggatgtagtgcacacacagggaagatatacaactcatggtaccagtgggaatgtgctgcatcttggcagctggtgatgatgtgtatcctgctgtccctgagtccctggggcaggtagtagagatgcctggatactgacatcctttataatcccatgtgaagtttgggggcagaatgccagtttctgtaggcaaagggatcaaaaggtcaggctgaatttaatatgaactaaaattgtacatcaatttgaggagtattatagtcttcacttactaagtatctcccataagtagacctgtgttttctgttgtctatgccttcttcccttgagaaacttgggtgagtctgctattctgtgttcttttcattatctggagtggattctgtttcttagaaaacacttatgccagacagtttacttttttcaagttgaactgttgactgcaaaggccctgtggttgagtcacagtgcatgtatctttgttatgttacaatgtccttcctctctcctctcttctactcctgactcaccactagggagccctgatgccacctgggctacttcagtgctgtttccaatgtcaaagagcttttgatgatgcccccattctctgctttccttgattcaagggattctggggtttgttttgcagctggccagttggctgggaactcgtctgtagagatgtatcgccaggtgcttctgtctggatgtcgctgtgtggagctggactgctggaagggaaggaccgctgaggaagagcctgtcattacccatggattcaccatgacaacagaaatatccttcaaggtagagtgaaggaggttgctataaggcagctgggatacctggcaccgtgggggtaaagctttctcagacaatgtctaggtattgcaatggagttcacagactgagaatcatctttatgattgaatttagaagtcaaaatgtaggagtttgtccaactaaccaaattctcaggaaacttacttgagcaagatcaaagattttttttttgttcgtttgtttttatccactcattattttcttgtattttactattgcaaaacatgtcaaacatatttaaaatgaaaaatatgtgtggtgttgatagatatattttttgagacagggtttctctatgtagccctggctgtcttggaactcactcggaagtccaagctagcctcgaactcagagaccagcctcctgagtgctgggattaaaggtgtgtgctgccaccaacaccgggtgcatcttatggtcattgtgtgtacccatgtttctgccatgtaaatcaagagacacaaccctagaaacacaccttatgtagccattcccctgggatctgctctgtcctaagaggagagctctcttgaatatcacaagtgaacactactttgtacattttacagctatccacatttgagtacaaccttagacagtgtgaccccaccggttgagattggcttatattgctaaatattctagtctgcattatttttctctcttggattttccactccatgttgggagatttgtgaattttatttcatatatttctagctttgctttattcatcttgaagatggtgttaattgctaccatttaattatgatatcattggagtatctcttatcagaaatgcctggcattgaatgtctttcagattacagagttaatcagtttggggaagattttcttagactctattggctgaacacccataagccaaaaatctaaaaaccccaaatgtccccaaatcccaaacttcttgtacataatatttgtgataaaaatttcaatctttaatcatttgcagtggctttgtgggttcattgagtgtgaacatctggggtagtaggtccagggaatgatctggatgaaggtattcatgtctctggggccatgatgtctgagctgacttgggtttcttaccactttctgattttttttttaaaaagaatgctgaaatttagaaaatgtagtcttaaccctgggtgactagagatgtgaccaaataaataaggtgtcagtaaaggaagagccaacaaaagcagggatttcaggcaaggccaaatccattgcagagaaatgggttggcttttttttttttttttttttcctagtttaagctacttttgctgttgttttaaaggatctctggagcctactcgggacttgaactccagccgctgcctgtgctttagaatgtaggattccaggcatggggccacctctcccaataacttggcttttcacaatttggttcaccataccatagatagagaaaagttaacacttagtcttcacttaatttcacaaaacatttaatgtagtttgactcaaattctgaccaaaatctttacaagttgtattagctcctgaaaccaaccactctgaaattgtttattaacctaaaatgagaaaaaaaaagattatttttatggttttatttccgtaccccacttcctttcttccttttacaccctgctcagtcccagtttcaattagttaggctctgaaagaaagaatatgaccaggggccacagagcagaggctgggaaaagccccatggggcagagatttctccaactggcaatggtgcaaagggtcctgactatgggaggagagggggacgacctggcacttcacttgggctgctggcagagatacccacaccctgcccatgccccacttctaccagttatcatccctgtgagtcccaattctgttctcttaaagcttagtcaaaattctttgagatcctgggatcagaataactcaactagcacattctaaggaatatttcttttgtggagcattggcttcccaaccttagccacccggttcgcttggagtgactcttctgtgcacttgacctacaagtggtccttcagtcacatctgtgagctcctgcctctgctcgataaatgtccctgcctgaacacacgcagccagcatccctaccacatccaaactgtggcagctttagaggcttaagggtagaggactgcatccttctgcctgcgggtgggtagggtgatcagggtggctagagattgcctagctatacccttctgactcttatccctacacttctgctcatgagatttggagagacacggagacagtgaggtagttgtggaaatgctagcctacactgtagataaatttagtaacaaagatttagttagtttgttagtccagaagccaagttaggaaagacccagggatgctaggtacaggtgccttactcagagtcttgtaagtgcagtgcagagcctatgtgaaagacttaagtctggtacttagaggtctccccttccctcacataagtccagcccctgctctgcagagtggtaatctgctttcccagagcctggtgtgtaaggtgactttggaatggtgagattaggaacaagggattggacctcttctgctctccattgtttaatcagcaaattaccccatccttattatttactgtgtcatccactcaacccactgtgtatcaggagctacatgggccaccttgtgatccttccaggacaccatacttctggtcaggttgaactgaagctctccccttacctctctgaagcatctcaaatgtcaccccccccccataaggactactaggacttctctgtttcatacgcctcctagtggtaatgccaccccttccagatagaaaagctctcactgcctcactctgtgtttttaagtttctccatggtacccagtcaccttatgacatgctgcttaacccagtcactgtgtcctttgcttactgggtttcctactatcatgtaatcccacaaagacgggaccttcattctgtgaccccatccacccgcattacattaaattgaacctgacagagaggaggtgatcaataaagattgggagttttgccatcccagagcaatcaaagtgtagcctcactttcatgttcatctgcctttcctctggccattatgcaagtgaaatgtgccaaatgcagatgtggcaaagggcaagggaggcaatcagccagcccacccacctctctgtctctctgtctctgtctctctctctgtctctctctctgtctctctctgtctctctctgtctctgtctctctctgtctctgtctttctctctctctctctctctctctctctctctctctctctctctctctctctctccccctccctctatgatacatggttttactgcatactttggttgtcctagaactagctctgtagactagactagcctcaaactcattcacagatatccacctgcctctgctcctgagtactggtattaaaagcatgcatgaccacctccctgcaggcaaaagggttcaaggataattttcctactgctgttattcattgacctgggtggtaagcaggttactgaaagcagtgtcataagtctctgcagtaaaggagcatggtactggaaatgactgtaacaccaatgccactaatacagcactataaaagagcatcttaagagtcactgctagttttctgaccccgagcaatcatgcatacctcacaaaatatttcaaacattgaggagaacaaaagtctcccagaagggcttctagattgactggtcaacaacttataattcagtaaagtcttatttgatgtgaaaatttggcaaagctttttagcctgtagctaaatgtattatagagaagacggagagctggtcagagagaggaggaaaggaagaggggaggtaaagagagaaagagaaggtagatgtttggtgctgctctcgagctgaccgctgggtcaactgcgggtctccaggaccagctccagcattgctggctgcaggatcttggaaaagcttcctatctgcctgagccttgttctcattcagcaaactggtggtaatagtgcacccctcctaggcacattataaatagaaatgcagttcaaagcctgccaggcttgctgtcagaaccctgcaggtgtgagccacagacattgtaacactgtttttggctgtaaagccaaacttcaattttctttctataaggataaaggctatagtgttacataggtaaggaattcttattcaaccagactgagggcctagattcaaattaagtcctctgtaaaactggtgagggaagttttagtgtcctctctgcttggcccatgaccaataggaaggtgccagaagcccccacccataggagagtcaacataagccagacttggttagccgagaagcatgggacagatgagcttagaattttggaattgagcttgacttcttaggtcagttaatacgctgaacttccacttcataacctgcataacagaagataattattctccttatgggatgtcagtcgcatggtacatttgtgtctggagttacctgaggccttagtgttcctagttagagtgtcagttataggaaggaaggagggaatcaacagcaagacgagaaccttaagatgacttaatacctgctcagtgtgagctagcttttctctttcttttactgcaccttcataacagacctgtggaacagggttcatcacccctactttacaacccatcaaaccaaagctcagaagcactaggtcattctcccaacatcatactgcttgcaagtccaagacacggttgctcaactcaagtccgtttgcatccacagtctgtgtgcaaatgtatgaaatataaaagattttgcatcctgacatcacttgccttgtatagtgctcttattttgatggattcgacagtggtaaaagttaaattgattatgtatgaaaagcaatctgtgaattcacttccaagaaagagtaagagtggttctcactctgcgcaagagcatcattcttagaagatatatgcaaatgcagcacagaattagaaagcctcatttctactcccaggcaagggaaatagcttaatgacattgctataaagaacaccatgccctgcacaggaaagggagtctgtgggaagggtttcagcatgaagattgagaacagaagtcacaactgcaaagaataaatgtaaattaaagcagtgtatggtaacgtgaggtttaaatagtgtggatgatggaacacctaaacaataaacaaggtgctgagaagatggctcagtgggtaggaacactggttgttctagaggcccagggtttaattcacagagcccacaagaaagatctgtaactccagttccagggaatcccatgccctcctctggcctctgtgggcacttgcatatatatggtacacaggcatacacgtagacagcatatacataaaacaaaaaccaatacatcttttaaataaacaaataaacaaacaaacaaacaataggattgtttcaatgttatttaaacaagaaaaacactttggaagaagagtactcagatgcctagtagtaaatgtgctttgcaatctgatcttttgtacattattatagacagtttacaatgaagaataatttggagatgtgaagtactatgaatgagttcatgttattcaacctgtctttttttctttcaagagtccgttcctagaagtacgtacccatttaacagttgatgaccagttaggtcaatcgtggtatttctatctttctagaattttgtagagctattggagcttacgacatataatgaatgtattttcgttgctggatgaagcacttagaatattgaatagcctaacactgggctacagcttctgccctgacataaatatttaaaacaagtataagaggaaaactgaattactgatacacattagaacacacatgagttttggaaacacattacctgaagagtgcccaaaaatatactctgcgatcccgtatatattagatgtttggaaaaatcaggtatacggaaacataaagattcaggttgtgggtgagttgctgagagtgtgtgtgaggtgggggttgggtaaagtaagcaactgctagcagggctgtagtttggggtggtggccttgcaactctcttaagcactttgtcttcaacataaggtctgtctccattttgtttgctgtcgtttgttggttttggtgctggcaatcaaacccagtaccttgtccaccctgataacagtctagactccaaccccttttatttatttcttaataataatatttatgaaaaatacagattatgtaactattattaaaacaaaatcacacaaatacacatacacacaaaacaggccagaagtaaatatgaccaaatgcttatagcagttaggttcagaaaataaatttatgggtagaaattttgtcttatctgattcatcaaagatagctctatgatctgggcacatcctaagtagtagagtacttgcctggcatgctgaggccctagttttgagcccagaatgctataaacaaatagcagtggctacaaacctgacacatacaaagaccaaaagaaatgaacaataaaccccaccatactaatgaatttaacaccaagaaaaaaaaatgtgttcttgtttcaggaagtcatagaagccatcgcagagtgtgcgttcaagacgtctcctttccccatcctcctttcctttgagaaccacgtggattcgtaagtatttggagcatcctgtgaatagtctttctccctaatgaggtatctttagcaaacttccacctgatttcagatggtttgatatcagcattggtgtttttccatcctgttgtatcgtaagtggcatgctttcatctgcaaggatgaactattcatttaaatcttatgggcattaaaatagtccctggacttgtggggccaggctgtcttcatgccaccgcacgattctaaactcaggagttcactttgcagtatggttgggtgcgttttctttatgatatgctgttcctttgctgacttggaatgcagtgggccactctttaaaccctctttcagagactcccatggctatccatttatattccattttgttgtcttaaaaggccagttccctctgcttatgactgtagatggaacatgcataaactctcttctcacacccatgtctgttggctacatccctcctttccagctgcttttcagtgcttatttgtattgtgaaactctgtctatttcaaagtagcctgcacctactgctgtgctacagaaagaaaagacaactctggcataactattttatatactcagatatttgctatgcttggaatggaatatggagccttgtgtatattagacatgtgttcttcaactgagcatcaatacccatccctcatttttgagacatggtactgctatgtaaccaagattgctttaaactctcggttctcctgcctcagactggaaagagctagattacaagggtgtactaccacatctaacaactattcattttattgcaaagaatcaaggggcggtaattaaagctatgatctggatattagtatgtacatcatactatcataagaaaagattattgtttgtgctgatgcaaagtctgttaaaacaactttagtgtgtggatgcaatgcttgaagaacatgtggtagggccatgattacttatagagtgattgtgaagtcttccatgcctcacaaggagccctggcacgtgtgttgttgttgttgttgttgttgttgttgttgttgttgttgttgtttgagttgtttaggatttttatttgttttaataaagctggtggcatttatgataaaagagttcatacattcctttgcctccccttccttctgagagtttattttcagtttcctaatttgcaccgtatgcttaaatacctgaattcctacatcttccagaagcagtttgagcagaaccaaatttttaagtagttaaatacagtattccgttaatatgtgagtagaaagcaacttgggttagaagtaaccgattttctaactatatttctagtttgttctcaggactgtaacattcaccactctgcattctgtgtcattgcaatcatttcatcctatgaatgatgaaatcccaatacatgggtttcctaacacccctgagggacatggaagagaccggaatctaccccattccttgctatgtctcctcaccctgcagtgactgcatttcacacctggtttgctacaacagctcagattttgagctgttgactttgggggagtctttcccttccttgtctatctcattttcccttggcttcagcagcccctgtccatcctgttcaggcagggtgtttttcagatttgtcgacggtgccttgcttatgttttcttattttcttaaagaagtatgtctacttaaagcagacaaaaaccaagaactgctgttccattttgcattgtctcacttgctacaaagtaaactctcccttgaagtaggcagagaggccacacccataatcaccacaacatagaaaaggttacatttactgaatatgtattttgcaccaaacactgttccctatatgttagccttttgtgcaacccttgctataaaccctattgttccccaaaggaacggggtcatccttgtctttcaggtaaagaacctgaatcctaagtgagcatttagcatgcttgaggctatgcagctgaggtgtgactcaaaccaagctagcctggccttagaatacagaatatgaaccaacacacacacacaaactgacctatttggcagatgctttgtggatattttaatatgtttagaaatatctgctgtggcttgaagcacgtaatatatttgtgaatttcatccctttaattttaattaccatggtggctgatgttgatactttaaaaactttgccttgtctttattcattaactgcagtcttaatgtcatttatttctgtgggtctgacctacaattaaagtctctttaatttccgcgtgcgtgcgcgcacgtgtgtgtgtgtgtgtgtgtgtgtgtgtgtgtgtgtgttcacttttctccctgttctattaaaagaacactgtgtgagaacatgagcaacctggtaagtgaatttcacatttcacttatttcttggatacctacatcttcctctccttgtattcacacagacttctttctcaaagccattctcggaccaacagcatatgttctctggaaacttcttagaaatacctgcatgtttgccctatagattctaagtatgagtctgcagtttactgatgctccaggtgatcagaatggcacatgtatgtggctcactagttgctcttatcaggattaccttacagctttgctcaaaatgcaggctctctgtgttgttcccgtgttctttaatgcagcctagaacagtgcccagcacagatgctctgttctcagctgcagccaagagcaggctgacctggcagacttcctgtgtaagttaccactggcaaaagtcatctaccccatcaaccactccctgcctgccccaaaggtcccatctatatagtttctaatgaattgtccttaaagtgcaacctccagtatgattcaggatttagtcaagggttggtcatccctttctcacacttctgagagtcgtcatcctcttctcttagggctatgtaaaccatgcagtaaagtcctgctcaagcaagacagggaacagtgtagaagtgtaaggctttgctgtggacatgatcccagtggaggcaggaggattgcaagtttgaagccagcctgggatacacacagtgtgaagtaagctttagttacataagaagattttgtctctggagaaagatctcaaattgttgcgttgggctttgcaaattcttggaatctttcctttaacttccccgcagttccaagaagataataactttgagagttgacacctgaaccccaaaagctcacctgaccatagagcacacaattcatttttgttagagacagctataatgagcactttcctcctgcactgaagcagagcttcagtctaagtgtcccttcccagaaaacagtgtgttccaggcttccccttcagggaaggagtcaaaatacaaattacagcccctaatctttatgatttaaggtaaaacaccatcatttgcatcatagttactaagtcttctctttactacattttttttttttttttttgcttgtcattgcaatataaccaggggaagttcggaccctcagtttgtagatcgtaaacccaacccagcagtactgggtgctgtgtaatgatgtttatcattgcacaagatgagaaaactgggtttttaattgcatctgaaaaggtcaagggaaacaggagtgctgaaagcattcagatgttccctctaacagcatctttacaagggctggaggtacagtttctgggctaaccgcagaccaggcgtctcctctccatgagatcactttatatacctctcgctcgtgtagttcttcaaaggcatttgcaactgttactctgttgtatcttctcagcatcctttgtctggttccaaaagcagttaaaatccttctccttgtacagtttcaaagcagttcagagccagaagctcacctcagaaaaccctgaactcttgctcctgtcagaccagtttcctcctggcagccacctgggttactccctgctttgctctactctttctgcacagaaaagttgctgacaagcaaatctgagcatagaggtgtgtgtgtgcctgtcatcctggcgcccagggtattgaggcagggggttctcaaccatcaggccaccctagactgcacagtgaggccatgtctcaaaacacagggaagaaaagagttggagacagcctttgccaaccctgctgtatccttccagcatcgcccatgtgtgcacgcacacacacacacacacacacacacacacacacacacacacacacacacttctgcatggtttcctagacatatgaagctccctctctccatctattctcctctctttctttctcactcttctttcccctcttgattccttataaataatctgtttctgctttctgttgctgtgatacattttatccaagaatttacatggagccacaaaaatattccaaccccaggagccttgcagttgacatagaaccaggcaatccaacaaaaggaacaaagtttttaactctagaaatctcatgaatctggagacagggacatgatgtgttgtgtccttgtctgggttgtgtacggtgaccttaaaaatagccctgcacagccaccctgcctcctgcccgtgtgtgagtgtgtgggtacttgtgatgtttaggaaagagcttcataacaatggaaactgattctgactgacttctttctgtgctagtaatacaaaggacacctctctgaataaaccccataatttctttctttttgctcttagcccgaagcaacaagccaagatggccgagtattgccgattaatctttggtgatgccctcctgatggaaccactggaaaaatacccagtaagtagctgcactctgctcccttgaaggagaacatttatcagttacagctggggagatatgtcctctctgtagatatatgatcagcgagatctgagctgactggtgtcagaaaatatgtgtctgtttccttttctttatccagccttatccctcctctgcttaaagtgacaccattagtgtttgtgaacaaatgtctattaacccccaaataagttactgaggacaagccaaagtagtaattccaccaaagtctaatttggtaccagggagttacttataggaatatggatgaaaggttgttgacagtggtgtgaataactcaaaggtaactacataatccaaaagcccacttcagcatgggcatcaactcatggatgctatatccctggtgctccctgcctgacaagtcagcagctagaccggttgaacagtcctctcccgattcacaccccaccccaccccaccccaagcagtccatactgctggtataattagggaaagaggccttgagaagcttgtaggtttcaggaacttcctgagtgtgtgagatttgttgacttcccttacttccggaacatcatcagcctccctctttccctctaggagagaatgtttcagttgtcagtcaagattacaaagtcctcagcagtgagagtcagctcataaaagacagtccaagaggagatagcactctgtaaataccaccatctccccccaccccccaatggatctttgtcacaccctttggaagtgaatgcaaaatgtggcaatactggttcctaagcctgtttctgccacctgctgtccaccacctacatttacctttgagaaaacactcaacttcagttgcatccatgaaccgatgaaatgccccaactctccccatgggtatccagcaaagaataaatagtcactaaatactatttaagcctctctcttattgcttatttttcctttaaacaagatattggggagctgagtaaatctgattccctaatggacagttgtgagccctgcccagggtgtctggctgcttgaacagaggattgtcggccaagtagcccctcgttagcagccagctggcctgcccttatggcagcctgacagccctgagcattatatgcctgccttgagggagctgtgctgaaactgcagcttcttgctgccaaagcaaaacgattctcgctacctctgtgttaaacagcaggcaccagacttctcgccatcaccagcctcagcgacctctgaacagccatattcacccacggcagaggggagcacagttcctggtggcccagcagaaatttgtggttagcgcaagcacagtacttaattggtgtggggaattctgcaatgcaatgggtttcggacacacctgccacgcccccttcaccactgtagaatggaagcaagctgtttaactgtgactccacagagagatggccttcagtgctgccccctggtgttgcagcatgagcagtccataagacaattctctagcctgctgttctcttaaggctgaactggggataggaagaggagctggtaggagcagcagcagagtagcaccagatgacactgggattccaaagagtgaccaaggtgaggaacaaaggtgctggacgaataatgaactgtaaagaacagggaagggaaactgggccgtatttaatagaaatcgttacaaagaaagctaagccttaagttcccaggatcgagacctataatactaggattttaggtgctctgggtccttacaccctaagctctttcaggagatagagcacaagcaggcaatagtgccttgctgctgatcactgctgcaggaagcagaggatcatgacagctgcccagttccagactactggtggctaaagctcagactgaaagcctgtcaccatgtcaccatacatctttagcttcttaagcctagagcagtagaagcctggctctctgtgcttgaagctatataagacatggagcatacgaactccaggtcccaggctcaggtcctcagggggcccagcttagaacaagggaagatcttctcttcatctccctgggactcctgagtaagaggaccctgcccagtggatgggtagcagccccatccctgttcataaaggcaaagagcagccagaacctaaagaagcctcttcttcctggacactttggcccagtatctgcatattttcaagtgagttcatactggtccccagactcatggcaagcaaaggatagagggccagcttgtgggacttcaaaggcctctctaaaaataagcctgtcttgtgtcttgcacatgctccctgatacagtaacttataaccttctcatgggaagttgatttcccagtatatggacaaacttgcaacagtgaagtaaggctcagtaagacagctcagatctaggggcaagaggaaaatctgaaattatgtctgatttggctgatgctaaaagcccacccgaaaccaacacaagatgttgctgcccctaacgctttgtctgaaacagtgacttatttggaaacttttacccaacttcaacaattctttctgtccaatgtttggccttttcccaaagactcaggtcagagatgatttatgtatctgcagtaaaatgattggacttgcagggcccgtcagaaaatgcctgagagtccaaggtcagaccattaaatctacctgtacatttccgtggcctcatttttttttttttttgtagtttcattgtagaaaatgagttaggtcatttaaaagcatcttttatttaaaacaaatgcagggcacaattagaatgctttcgtgaactatgttgaacatagtagatgccaatctagaggctgtgctatccaaagcagtgggattagagaggtgcctggaaggaaggacagtatttttaaaggctgtgctttcttttaaatagctggaatctggggtacctcttccaagccctatggatttaatgtataaaatcttggtgaaaaacaagaagaagtcgcacaagtcgtcagagggaagtggtaagaagaagctttcagagcaagcttccaacacctacagcgactcctccagtgtgttcgagccttcgtctccaggagctggtgagtgaggggctgccaggctcaggatgggtgnnnnnnnnnnnnnnnnnnnnnnnnnnnnnnnnnnnnnnnnnnnnnnnnnnnnnnnnnnnnnnnnnnnnnnnnnnnnnnnnnnnnnnnnnnnnnnnnnnnnnnnnnnnnnnnnnnnnnnnnnnctttcagctttcagctttctctctttggaggtttatgttgtgttgcttttcggtggcactcttaaccacaaattctgtaggtcgaaaggtttctgagaaagcttctggaataaaccgaagatgtctttcgggaagctcttaggaaggatttttcaagccctagaggccactcacacccaccggctcacaggtccccctccctccagcttccaagctagtcatgttgttgtatctctatagtccttcctctgtggtcactttactctctgaccaccacttgaaactcttgtcagctcatagcctcaagttatcggttaggcccactgagagatttcaaggcagtctcctgcctcagcctgatgtcagataaggagtcagctcatctttgggtaggtattacactggctttcacgtgaggcaaatctgcttttcagcagagtcttgcttctaaacttcatcatcgaccacatcagcagaagggaagacaagagattggcagacttctaatgcaatcattgatgggttctgggctttgcagttctcccctgtgttataaagcacttaaaaaaaaaagagtgaagtgacaaatgacttgcattgtttatgaaagggattggcatttttttctttcacattagtttgaaactgaccacttgtgagacaaaaattcaaaggccattggatttctttgggttatttgccattgagcctaatttattcccccttacccagaatcctgacaattgcagagagacagagagagagagagagacagagagagacaaagggagacagagacacagagacagagacagacagagagagagacggagagagaacagaggatgggaggatagaggaagaaagccaggaaaggaaaagggggatggaaagacagaataaagatacttaatatatcaaccaaaactaaacacatgcacttcccctgcccagttctattcctagggagagagctaacaagaaatgggaaatgggtagtgatatttatcaagagatggaaaaattgctataagcaatattattaaaaatatccaaacactggcagcaagcaatccatcagctgattgcaaatcatggtttagtcatacaaaggaataatgtatataatgagagtgatttacagctatccacagaagcataactgactgtgaacacagaatccaacaacaacaacaaaaaaagtatactatctagctccatctgtatgagtataaaaagcaaacaaaaccaagataagctgttagaagtcagggtaaccgctagccttagacagaactagaaggaaatctagtttcttctggactctagaccagacttctggaccagtctattttctttatattttgaaaatccatgtattgctcatatgtcatgcatttccccatgcctatcacacataaattaaaagatttttaaacaattggaatgttaaaatataaagtggggcaatcagaacatgaacgtggccagcttagttggttggttgcttgcttgtctggttgggaatttgggtctgtcttgtttgagcctctactgtgctctgaccttttgcagactaggcaagtgtcctacctctctgctgagtgtgtcacacctgcaagccctgactaggcctggtttaccttttgtcttattgtctgtctcacttgtcaactgctcttattatttaaattgacaccctaaggtacagacagtatataagtctctcagaaggtctattcccctccatggttcacagatatgttttttttttcaaatatcatgacatcattctgatttccttttgaaaattttttctcagtatgatgtgaggatgatcgatcatcagaagtctcttcctttccaacctgtcctaatgtgccttcctttgcacgtgggtgcttgtgggtatttgcgccatctgcttttatctaatcccatttctctctcccattaaccagatacataactctaataataatgatttctacaggcagtgaacacaattgcttaatacagagaaaaagcagcaatctgttagcaattctgtaggttccctaagctagccaggagtgagtcgtgtgcaatcggtatttattgccatgtagttttggagtctttagtacgtaagtaggccccagaataaagagttctgataatttatcatttggtttgtggatgttcccagtaccaggaacaaacacataacatggatcttattttaaagctaagtcagtctgttgcctggatgcctcttctgggagccaacccttagccagcacactttccagaatgaacaagggtcaagtaagataccacttttgggtgttgttagtgttgcttttaaaaagggtattatttttttatggttcaaatagatttctccagggtcctctcaaagtcttataagagaagccccttaggtatgtacagcctctgtggtgacttaatacataaaagacagatcagtatggttttgtttttctttgttaagcttgccaaaggaagaaaaaaaaaaaaacaggtctttgctttcacagtagaggcagacgaagtttttttcttcctcatacaacccaagttacagcctgaacgtgtatttgaaatggtaattggacaattgttttgttacatgagtcattttgtagaatgttccagcaatcatcttttcatgttgcttgattaaagaacacatccttcattaaaaataataataatacaaagaagtacttcaggaaataaaatgaatatgaaatattaagtagcaaccccctaaaacaacgcatctgttatacagcagggtgcatttttaagcaagtatatggggttcgaataattattaagtcagcaccattaaggacttatgtggccctttgtaacaggccatccagttattggtcacagaagtctttctcctctatagaagtttggtgcctactttcctcactaccatccagtaattgattgacctctgtccctcacatgaaaacacagagttgcttcttggaaggtagttctgtgggcactgtgtcatccatgctgcagagtgtggccaactttttagaaggcccctctgggagcaggtaccaggcactcagttctgcctcagcaatgagctcatcctgccatctactggaatatttgtgctattgcagtggaaaaaactgaaggaggggagggtgattgaaagaaaaccgactgtggctgctttccttttcccttgaaactatttttacacgactgaaagagtttgaagtataggggaaattagtacttaatactaatgtgatattttgaataaattatccattaactctaggcagaagggtagaatcaaccaattgcaatgactggctaaatgtgacgctaaagtaagtcagattagcatagatttttaagtgtagtgattttaaagcttaattttctatttttattgcttttcaatgttttttcttcttgcattagattatttcatcttgcccttttaaaaaaaagaatgatatcatttaaaaaaatctttattggttccttgagaattccctacaaaatagtgcttacccccaacaattcccagatccactctcctttctccatccttccaacggggtgttccatttctttgtttgttttaaattcttcagtaccaacttgtgctgcccaaatattcttgcatgtgcagccttctgctggaacacgatcaacttaccaggggattaaactctcatagaaaatggactgtctgtcttccagaagtcattaattgccaatagctcctcctttaagggtgacacttcatgctcccctcccttccccatgtttagatttttgtctggctgccacagctactgtgagttcacaagacaccgtagttatccactgtctcaggctctcacactcttagagccgaagaatgctgtcatgtttatgattgtagattatttagatatgatgattgacctgcacttggcagttctcaagtctttgtgtgtgctaccatttccccgcagtttctgatttcattcataaacttcttcaaccgctgtgaagtcattttattggagaaggttggtccctgagtccctgagctgtgtgctggccaggggttacttcaaaggggcatgactgaggactggacagaaaaacaaatgaaagcagggcttgtctctgttaaggtcatggagattgacatccacgagagaacatgtacattatagtaagaagcacagagagaagttccgtctaaatgtcaagttaagtctctgttactaagaaaatgtaaatctttggggaaagaaaacagcaactttaaaaggagcagaatgtcagccttccgagtgcatgccctgaacaaagttggcagtgtgcttttgcgaactctttgaactttcaaatactgaaattgtgatctgtgattaaaatttgacaggggaagcagatacggagagtgatgacgatgacgacgacgatgactgtaaaaagtcttccatggatgaggtgagttacggatatcttacgattctcttctgccatctagtgggcaaaagaaataggcacaggacattggattaccaactccattccccatccccacgaccaaggcaattaaatgatttgtccaatggtctgaaatccagagagagtatagggtttgaaggagtgttcagaaatgtgaccgtgattccattgtcttgattttgtatcaactgaagtgatgtcttgatattagctctctaaaggatgctgccagctcaaagtaataactgcccagaactcaaacaaatcagtgatagttcaatgaggacttcaggattttctttcagtcaatatcacaaaatttatacggtctctgcattcaaatatgttcttagaggctttggctctgtactggcagccttatagtaaataaaagcaactcttctcttttaaatattcatttgtttactgaggtgtttgctaacttggttttgtgacaggatgctatcattaggcagccctgtctgacctgacttaactttgtagctcaggctagcctcaaacttaaaatcctcctgcttcaatatctagaatgcttggagtacagatgtgtattaactacagatagctcaataagcattttgttgtttgtttgtttgtttgtttgtttttgagacaggatttctctgtgtagccctgattgtcctggaactagctctatagaccgaggttggcttgaaactcagagatctgcctgcctctgcctcctaagtgctgggattaaaggtgtgtactacaactgcccagcttaataaactattcttatttggcacccttttccttatgaatgagtctcactgggtagcctaggatggtctcaaactcccgggataaagcagtctctccatctcagcctccgtgtagctgaaaccacacctgggaaccgcggtgtccagcttcatttaaaatgtgctttttatgtccccactaaatttcctcttgatttctaagaggagcacggctgtaataactgaggctccatctgtctgagagtggcttcagggtacacttggatcattccagaattgcctatttttaaatgaatatttcccagttggcatttaaccagaatgtttctcctagagttttcacaaagaaacctcatctctatgcatttttctctgctaaactaaaaaatgagaaaatatgagacccatctctagaggccagtcttgtgcaagtaacgactgcgggtttcctttattaaaactcgtattatagcatatgtaattgcagatagcatctaaattaatgcaagatctcactatttgccaagcacggttccaagctcactcctccccctttctttcttctttcctccccccatgccctcttttttgagacaagtttttctctgtgtaaccctggctgtcctagactcaaactcagagatctgtctgcctgcctctatctcctgaacgctgggattaaagacaagcactacaacacccagtttctttttaatcctacttgtaataattataaaacttgacatgctatagggctgatttatatttctaattttgctggtgattaaacagcaggtaatttacttgtccatagtggagcagcttctgaccagcgggctttggatttaatatcagatggctttgttctgggacctaaaccactatattgctgtcatacagcacacccttacacacaggaaccaatgagggagggggaatgtttatcacaaactagaggaattgtttgcagagccccactgtccttacccaaggcacctttgtttaattatctctttttcaggccatacagtgtttacctacatgataaccattactgtcaaatgagttctttatttcctgactgtagacttcctctgtgttctctgctatacaggacagcagttcctgtgggcatcaccttattagcacaaattttcattcctgatacctggtgtatcagaagagggctgaggccctgcatccctataaaacaactcttctcaatcttcttaacacaacgacccttttatacagttgctcatgtggcgacccccagccataaaattatttttgccactacttcataactataattttgctactcttatgaatcttaatgtaagtatctgcatttcctgatgctcttaggtgacccctgtgaaaaggtcagttgaccacaaaggtgttgcaactcacatgttgagaaccaccctgccatctctcacattcataaagtagccatacagtgagcattcataatctgaaaatctagagctgggcgtggtggtgcacacctttagtcccaccactcgggaggcagaggcaggtggatttctgagttcaaggccagcctggtctacagagtgagttccaggacagccagggctatacagagaaaccctgtctcgaaaaaacaaacaaacaaacaaaaacaaaaaagaagaagaagaagaagaagaagaagaagaagaagaagaagaagaagaagaagaagaagaagaagaagaagaagaagaaaatctagagtctaaagtgctcaaaacctcaaaactttgaaaggctgagctgaccccacatggaaaattgtacaccatgattttttaaaaaattgtaatgtactggtttcaatactcagcattagaaaaaaattaagcagcaagtataacatgccagtgagttttcagtgaattgtttggttagacttagatcttgtccccaaaggatctattatatttaaacaaacactgcaaacactacaagtttcaaactctaaaacatatgtgccaccggggctttgtgatgaggctggcctgccttgcatccctcccctgaggtagatatctatgacgttctcttcagaagggaaggagtttctgctccattttcctgaggagctaaccctgcatagtgtaaggctgactctgaaaatgtttattattttttatgtttgcttccaggggacagctggcagcgaagccatggccacagaagagatgtctaacctggtgaactatattcagcctgtcaagtttgagtcctttgaaatttcaaaaagtaagacttcctgcagaataatctctagtgtagtgtataaacgggaagtagtcagaatttggtaggagtgttctgttctggacatcttggatatttgcctggattgcacatcttaatattacagaaaaataactactttaacacttcaaagatataattatatttaatacattagaaaagcatatgatagtattacatgatattctgccacatatttggatactagaaagatattgtccaactgatcgagaatttcacatttctctttgtcttactacaacccccatgggatcactagtgagatagtgataatgttaaccatccaagcatgacagaagggaagcaggaataacttggacaagcttgatacctcaaaatagaaccaacccacccgagttccatttgtccagctcatatcatgtacttatgtgacttggtgactcgattcatatcactcttagttttcccttcacctaactatggatccatattaaattttttaaaaagtcatttttctgttacctagtaggggaaaactcttttatggaagtgccatatacactcatacacatacataatatacacattcatatacggtaagataatatcagaacaaagagggtcctctatgtggcctagctgcttaactgaaattctggttaaatacaacagcctcatttttaaaaatgcagatataccaactttaagcttctatgtggcatcattatttatatttatgcacttctgctctgagctgctgagtagcacttggtgtctggataaggaaaggaacttaaatttcactgtagctcacacataaagatgagcattttctgataccgtaattgtcaattcttgttccctgaagcggttcagtgtaagcgtcctaatgcagtgggtttcctgccatttggcttcactttctatagttctgctgtgcaaagaggtcctagaggcacttccaggcagagtggtgaggactggatattctggggaacccagtgatgctgtggacatttaaacactttcttctctggtttctctcacttcgtcatgctagaaatctcattgatcgtattttatccattctaaagacttaattttaattaaaagtcctgattaaaataattagttacatgaaagtaaattaacgatgaaccaaaaataaaggatttggggtttctggaaagtaaattaggtgagtgggcaatggacggatggatcaggaggagagaatacggttcatgttctgaaagtgagagaggaaaagacagacaaacatcccaatgatcatcagctttcaaaatgtagagctgcttcctgactatgtgtaacacatgcctgagtgcagggcatagccactgacaagatcagtctttctaaactgaggtcactttgttttgcccctgcccctcttgaggcttaaagtccacttcagcatgttttcctaacaagcagatagtcaagaatgccatgttctctgacacactcacctctttggctgtttgttgtcatctaccatggaaacaaggctcacagactccaacttctccaaggagtgccctcctttcacagatctaattctgatgccacactagctgtgactttaagagttaacagtatgacataaataacatgcagtgtcagcagggacatccccacagcatcttctgcagataccccaagaagccaagctgagggatttagaacaagaccattcccttgccatatttcaccatattaatttattcatgtcctacaaaaccatcaggctttctcaccctagctatgaatacttgaagaggaaatttgcaagactcaacttttactgctagtaaatggtttatctataaaagtcttactatgcattactatgcagttcctaccttctaagtcactgaacatttgtttatttcctttagagtattatcatttataatactgaattttatatcttgccctgtttgttgttgttgaactcagaaagaaataaaagctttgaaatgtcttccttcgtggaaaccaaaggacttgaacaacttacaaagtctccggtggaatttgtagagtatccttgatttgatgaatgactgctgaacttacctgtttaagtcatggtttgtttgtttgtttgtttgtttgtttgataacagagatgaatagaatatagcccaagtctcaggtgtcacaatgtggtagcctggtctatagagagacaaactggctttaggatagcagaggtcctggctgcaaagctgcctcaagccatcaacctctgagttccttggcaatttgcttaatttttattttactcatctttaaacagaggtaactctactaacattacaatgtgctatttgattgggtacaatatatgtaacacaagtgtgtatacttaatacactggtctaggtatgctctctaggtttataaatatgtatgaataatgataacaattgtatgtatgcatagccataaacctggagcaccttacatacatgtgacttatattcaattaaaaaggaatggaaacaatgatcataatgatataaatgtaaattatgtcaatggtggtttctagttttatgttatttcctatgaatgaaaatcaaagaagccttcatcttacctttcataagttaatgctactatcctaaagagatttatttcatgacataattcctagaataaaattcctttacatctcatgagtgtgtctgaaaatatagctcagtcaagcatgagggcttgagtttgagctcagggctcatgtttttagaaagctgggtatggtgacttacatttataattgcggtggggtagggacagaagaatccctgtggcttagtggccagctaatctagcctacttggacaagctgtaggcctgtgagagaccctggctcataaaaccaaggggtaacatccgaggttgaactcctgtataaccttgaacataaatgtgcacttgtacacattcacacacacacacacacacacacacacacacacacacacatacacacacacacacatacacacacacacacacacatacacacacacacatacacacatacacatacacatacacagatacacacacacatacacacacatacatacacacacacacacacacacatacacacacacacatacacacacatacacacacacacacacacacacacacacacatacacacacacacacacacacacacacacacacacaccagtgagagaagaggcaacaaatgtaaactctataattaaagttgtacttgtgttattcttttgtcttccttaattccccaaggaatcctgtgacaaaggaattgttcagttactgtgatgctgaggaaactgaggacagaaaggtgaattaacttacccaaggtcatatggccaacaagttttaatgttaagacccgaattagtgttgcaccaacttcagccttgcttccttcataagagcaagtccatcatgttatcaagatagagcagtgttcagtggctacaaggttattagggtggaaacagctagaatgtgaaacaaggtcagagatttctgtgttctatttacctcatcaatcttaaggactgccatattcttggcaaatagcattcacagagaatgtaaagaaaaagagggaagagcattcacaaacagcttcgggatttgcactgtctactactgccacacagtaccatccttttgtcactacaactgcagctatcactgcgcaatcacagactgacacaagtcattcttgctgtcccagtttgtggtatccacaggtttcccagaagcaatactgtttctaagaatacatatattctagtaactcattctgtgcatatctcacccatcgattcgatgagatcattaatatctattttgtttccccagtgagagataaaaaagtaacgtaatagaatataatagataactctgaaattgtattcactacttaacatgatggtccagatacaacaagatgcaacttagcaggatatatcccaagggaacacgtgtggattcatccaactacatgcctcaactcttctggaatgctggctgtcagatggtggcgctcaacttccagacagtgggtaagtaacacagatctcactgccattgcctcagagcccaagtgtctgcaagccattaccatggaaactagggggagggaaagaaagccagatttgactggaaaaaataaattttaatgaaggaaaatcaaagaaaaggtaaaagactgaaatttgttaattgagagttggtctttaataatttatgaaaagggttttgtatctggatttcatgctattttcctacagtcatatgtgtactgacacacacataaacctacacgtgtgcacgcacgcacacagccatgtacacaaagatgtacctacacatacacaagcagacagaagcagaaaaggaaaaatcttccaaaaataatgaggccactaagaagttcaacacttcccttggtaattgtgtgtgtgtgtgtgtgtgtgtgtgtgtgtgtgtgtgtgtgtgtgtgtgtgtgtgtgtttgtgttgtgtgtgtgtgtttgtgtgtgagtgtgtgtgtgtgtgtgtgtgtacgtgtgtgtacactgacacacagacatgcttcttcatatagttccctattaagagggaatgtacacaagtgcgcacactgaaatatgttacagaaaatggaatttttatattatatgtatttctgtatgtcgaggaagcatgcacacacatgaagagcatgggtgggagttagaagaaaatttgtggcgctagttcccctccccctggagaatgaatcataccctcccagggcacagaaagcaacttgacctgctcatccatctcactgccagaaaacttgagttctagtagctgcttatgaagcatattccacaatccactcaaaaccccatttcagtcactaaccaagaatttttttctattatttaccaatgttctgagacatgaggtggctcagataccttggtcaaatgctatcattaaataacaggaacaacaaaggcagacaaaatccgtcatccactgttctagctacatctctttgactattgtctaggttgaacacttcacgtgctccttcatctttattgttttgcttccttgagctgcccagtcccacagcaggctgacctgcaagtcctcctcactgcaggggtgtgctaacagagtcagcatattgtcttttttggaactagaaaaaaagttccacttcatgaagcatggtaccttctgtcttgtgccttctttatatgataatactttccacaccaacaccaagtccatatttattctcctgtctgtctcctttttcaactcttcaaatttttatttttcatcaaatatttgtataatttcaacatgaaaactctttacatatatttaatgttaaactcaccttttctgtggtgttggtgacacgaggaacaagatgctaacgatgcccactatgtgggaccccatcactttctccactctacggactcttctttatttggaacaaaaacctctaaaccatccagatttggctctggtgacagtctcttgaggtcagttccttcaagaacctaaagagttatcccactgagctagaattgtatcctaacagatgtgactccttttgttaatttggatcagtggatcactttctatagtctactaaaatatctgtctgcagccatggacacagttacccaggcttccattttaaaatcttggaagagtgtctgtgtatacacatgtgtgcatgtgtgtcagtgtgtgagtctttgtacatataagcacccacacggaggtcagaggacctcttttatgagtcacctctctctatcatgtgagtcctggggatggaattcaatttctctgacttgatagcaagtgctccttatcacctgaaccatctcactggcactaatacttttctttccgttactgtgtgcaattggtactgtttaacaatgcagtttcctgaacaacagtgactgtttcaaggatgggaggtctggtgtttgcttaagttaccttgtccaatcttggtgtcatgatcataatagtttaataaagcaatagagaaattttaatttattttctctgctttaaaaagtgttacatagaactctgaattttaaaagccctgtaactacctctttgctggcctcattagtacaaacaaatcacttgacggctagttgggaacagccgacacttccttggtgccttaggaagttaaaatcttggttctgctctttatttttacttatttataatttttttgtgccgtgaatcaaatctagctttgatctgatccaggatttggcacacactaagtaaatacttcaccactgagatcccaggctctaaactctgttaggatttttagtctcagcagttataataaatttagggatttatttagtgcactgactgttaagaagactttgaccaataacctttgtccacttgaaaagagtcttgaacaattcatactgcttgtaattaatcacagaaatgcacatttaaatgtcttcctataagttaattaacaaataactaaagcaccccttatagtgagctatataaaaaccagtcctcaataaatctactaaaatggcttttgtgaattaaattaatttcaactctctggagagcattttaacaagatttacctaagcagtaacagcattttgactcaacaatttcctttacttctatcaaaaccattgcaaagttttcaaaaaatttgttatgacagccactaaaacaattatgtaaaattctgaaaattcactagaaacttagatgtgtccaaagaatggacttgttaaaaatcattaactcagataaaagtattcaaaggaaatttatacagctgttaaaattaaggacaaaaaaatgcttttaaaaatgagtataatgtttataaaaatgcatttgaatcaaaaaaggtaaccaggttataagccagcctgttgacagtattctctctgaatttggggattgtaggtcattttattttttatgtctccaaattattataatgtctatttcttggtacaggcatgaacagtgggggaaatggactaaattattatacagtcttattctacaatttccaagcacaaatgcactcacctgtgtggttttgcccatcagatctagctatgcagataaacatgggcatgtatgagtacaatgggaagagcggctataggctgaagccagagttcatgaggaggccggacaagcattttgatccatttactgaaggaatcgtagatgggatagtggccaacactctatctgttaaggtacgtatactcacatccttaccacccctggtccccacccctatgctcgacacccaagtcccaaatgcatcccgagaagaggctgaaatatcacttattctgcataaagaaggttttctgtcattaaaaatttatgagctaggaaggctccttcatacatctttccttttaaggatcaaacactcattagaaatttcccccagacaacatagaaataaaggagctgagtctcattcttaggatgaggataaatgaagctgaagaaatagatgaagtagccacttcccagaggcaaatctctctgagtgcaagtatcccacggagaaacggacagggaatccagctgtctgtcagaacatcttccagtcttcccttccccaggtctcaccaattctaattattaaatattaaacaaaagctgtcaggttaccatagtatggtttataatctacccagagtatccaaagatgtaaaaaaattttcaataatnnnnnnnnnnnnnnnnnnnnctcctggcagaagttgtgttccactcactaaaggtcttaggatcacgtgtggaatcctgtgtgggcccttgcgggtgtcaggcgactcagctggcaaggtagccggggctctagtggagtggaaggggtttgtgccccatatcaagcccgggtagcctgcttccctatgtaccgcagtctcaagttccacgagattggattggggcaggcactgtgttccactcaccagaggtcttagggtcccgtggggagtcccgtgtgggcccttgcgggtgttgggcaagactctgctggcaaggtagcccggggctcgagtctcgagtcgagcggaagggacttgtgccccagatcaggcccgggtagcctgcttccctatgtaccgcagtctcaagttccgcgcgattggattggggcaggcactgtgatccactcaccagaggtcttagggtcccgtggggagtcccgtgtggacccttgcgggtgttgggcaagactctgctggcaaggtagcccggggctcgagtctcgagtcgagcggaagggaaaagtttactttttaaagtctcatttatattgtgtttccatgaatatctctatgactaataaacttccaaagataaacatatatgcattttcagattgacctcaacaaagtcatgtgaaaaacttgttcacacaatcctctgacagtttaatatctaacccaaacactccagaaacacacacacacacacacacacacacacacacacacacacacacacacacacaccagggctttgcacctgctaagcaagtgttctaccattgatctacatctcaagcgcttagtctttgagagagagtctagctgtgtagcccaggcttggcttgaagttgcaattcctacagtgcaacctacagtgctgggatgacaggtctctaccttcaaactcagcatttcctgtcagtccctaattctcctaaaagtgagccactttatattaaagtttcaaaatgtaattatatctttagaagttatttaaaaaccacaaattatagagtgaactatgcaaaaacagtgctgtctgtatttgagaatctgttttcagcaaatgatgtttaactcctgtcaagaacagttaaaacacactcttgagatacactacacagcatgcagtgacagaaaactaattttaagcattcctgtcaattgttctagctgactcagtctagcagtagcttgctcttattcagatctatcatacttcccatgtgtctttttgtttattaattttctgatgaaactttttctccaacagtggagacagttataaaaccatgacacagatacagaaaagttggggtgaaggagaaatagttccatttactctgtagtttatgtccaaaatgtagggcactgcatagagttccacctgcctccctcatcacgctaagcctggagtcgagttcctgatggctctgtgattcctttgtgtgggtcttctggcagggactttacagtttctttacagtttcagatctacaagctattatgctgatatactgtcccactggactagcaatagaacactgaggcttggggacattgccatgttagggctctgcttttcatcaaacaacatgagctccccaaacttcagggcatatgaatcccttgcaggactcacttcactgaaaagttggtttttttacaatttttttatcatatattttcttcatttacaattcaaatgcaatcctgaaagtcccctataccctcccccgaccctgcttcccaacccgcccactcccgcttccaggccctggcatttccctgtattgaggtatataatctttgcaagaccaagggcctctcttcccaatgatggccaattaggccatcttctactacatatgcagctagagacacgagctcataaggtactggttagtttatattgctgttcctcctatagggttacagaacccttcagctccttggatactttctctaggtgctccattgggggccctgtgagcatccacttctgtatttggcaggcactggcatagcctcacaagagacagctatctcagggtcctttcagcaaaatcttgctggcatatgcaatagtgtctccgtttggtggttgattatggtatggatccccggatgggacagtctctgcacagtcactggaaagttttaaagatgttgtacaaagcctcccaggaggtaaaacccaagttcaacagcagtgattgattgcaggtgtggactcaccaagctcatccttgcctttcctcctctccagttagccatctataaattgttggcccactttggctccctaatgaatagttcaatattgtggagttgaatgagagtttaaggctacatattcacaaaacatctcccacatcttcctctctgtgtaaccaaattgtcaacatccaagggatccatcaaccgtcatagaggttaatggaaacagataaaatgtccgtatacttcattccagacaaagcagcaggaacaggggatgatggagcaaacccaggttgtgtgtttggaacaaagtcattcaacagtgttctgagctcacccacgacagggacaggacttccaagacagtggctagggtagaaatccaggacagtggtggcagaggcttactcagtgagaaagggcaaagagcctgctgatgtggtcagaaatcctgaaggaggcaggaacctggaaatctccttagttggccctgtgttattgtgtccattactctttaatgcagatccccaagatgttgacaactggatttagataggtgaaaacatgggaactgttatagggttatgtagacttaacccttgtttaaataggtgactgattaattctgtaactagacaaaggactcccactgttgtacagatggctagctggatgaggacagaggtcatgattacgtccaagtgactttcaaggatgctgctcacttactgctcccatattgctcgatctgattggctcctaacctgcccattctcacccagtctcctcaatcaactctttaaatggaagaggaatgatgtttctagtcttcccttttatttcattgtatgatttcccactcaggctgccttggactgtctcagtgttgtctcctgatgctgtgttactcattgttcaagacttcctgatatttttctagattatttcaggtcagttcctctctgataagaaagttgggacttatgtggaagtggatatgtttggcttgcctgtggacacaaggaggaaggcatttaaaaccaagacatcccaaggaaatgctgtaaaccctgtctgggaagaagaacctattgtattcaaaaaggtgggtctcctgcctgttgcaagaggcaagtttatctgggtgttttaaacagaggaaaaacaagcagttatttggttatgggtgtataaagcagttgtattttgaaggttatcataaaagctttaattttattttccttagtatttagcactatttaattgtatgaatgtatagcctgtgtataaatctgtgcagcatataaatatcagaagaggcaagtggatcacctagagatggagttatagaaccttgtgagctgccatgtgggtgctaggaactgaacctggatcctctttgagagcaacaattattcttaacctctgagccatctctccagccccttatttttaggacttgatctaatatatcacagtagcttcctgtgaaaacctatacacataatgatgtgaccccctgtctgagttcagggaactttcttcattgagggtatatgtgcaataagaaactaccctttggttcaaatgctcctcaaatggtactaagcacagagatatacccaaatatagcaatttctgcttgcatgttttcttacaacacagagaggcaacttaacttttaacctaaattaacagagtagatactcagctttggaaaaagcagggccagcttttctaatgcttttctggttctttctaggatttgcttactcttataaccagaatccttcatacccccacaggtagttctaccttctctggcctgtttgaggatagcagcatatgaagagggaggcaaatttattggccaccggatattgcctgtgcaggctattcggccaggtatgcatagcgtggggagagacttttattaaagaatgacatgggaactgttgctcctctgtgactgtgttgtataacagaggcgttaaaactgctcagatcagtctggtagtcttgcatgtttgtcatgttgctgtgctgtaaaagtcgactttagccacaatacttgttcataacaagctgcctaaaacctcacatacaaggatttgcaggtcccaattcatgagtcctgggggttagcgctgtgtattagtttcttttttactatatcatgaaaataccttggtcagactgctttataaagaaaagaagtttattttgctcacagttttgaaagctataaaggttgagatctgatcatttaatcagtttttcctctggtaaaggtctaatagtggaggcttccgaggggaagtaggcttagggacctcctcaccagacaggaaatcagagaactgggtaaggccacactcaagtctttttaatgagaatgtctctcaagaaccacctctggcaagacctagtggcacaggcctataactgcagctgtgcagaaggcagcagctggatggccacacagccctccattatgggaacctgtgagacaaagcagattggccacaagataaaggttgactgggctagcctgagctcatgggagaccaagcacattggccacagcataagaattggctgggctatcctgagctcagtgtatgcatttggggtgccatatgaggtcatttttttgtttcattgtgttcgttttggggtgcatgctgaagtagtgatggcacccaacatagggactcctttttccaacccacagggaaaaaagtacctaactctatatgtgtgtgttcactctttgcttgccccaaagcactaatatcccgtggacaaagcagatccccagccacaaaaatcatgtcaagtatgatttattatagaggacacatttgggtcagtaattcaaactgggatgtacagtttgcaagggggaatgtggtcacaacagaaaaataaaaataaaaataaaagcagagccatcagtgtttgaattgtgtgattaagatgagaagaaggtggcctgtttgtagagcaccacaggtatgaatggacatagctcgcactgggaaaccagcaggtgacacttgtgcttgtcacccttcaggctatcactacatctgcctgcggaatgagaggaaccagcccctgacgctgccagctgtctttgtctacatagaagtcaaagattatgtgccagacacgtatgcaggtaaacagtgccacctgggtcacctgcattcccatggcctgatggaaagctaactgggccaacactggggccttgggagccccataaactcttcttgtgtatggatgcggatgtttaacggtcagctgtttgaacctttctgtgtccattggaatcctaaccagtatttagtctatttccacatgggcagtctcatccccgtgggaccaacactccctaatcccttctgcccccttccatgattgtttatctaggtctgtacaatgaatttgccttcgctagtagcagatctctgatccattctatggatggagtcctaaattaacaggaattaacttagccagaagtcacatttttaaatggattgtttgttttttgtttattaaccatgggtccttggagtgaaagacactggccattggtggacattgtgacaaacttgggacacatgtttttggcccaaaggtgggcagctgtaactctctgcctagccattgccatgcaaatggcactcaaattgccaagtctttgattattgttccaataatctggaagacagactttatttgaagagtctctgtttataaagcacatttaaccaactaagccaagtatgaagaccactgctaggatagacaaaaccttcaaaaagaaggtggagaagatgcaattggggggttttatttgaaatactcatcattggctcgcaaaactgagggactatgacttctctcagaagttttatcaaaatcctgacccatgtgaaatttcaaaacatggaatatctgagtggagagttgcagggacagtggaggaatgctgatgctacatggatgagtgggatggggagatgaattaatgcacatggatagatgatggcttgtatgcatagatggtctcgtggatggacaatggagagtcaaatcctccagaaaccttgtctacagtgtctcatccctgtttagatgtaatcgaagctctatcaaacccaatccgatatgtcaatctgatggaacagagagctaagcagctggctgcgttgaccctggaggatgaagaggaagtaaagaaggaggtgagatgggatccaatctcaatacatgactgtaacatgagttccacatctacctgcccacatgggcactattgtatcacaccccagacatggcacgctgggatacaccttcatggatttcagcctcaagttagaacactttacatgagtcaccaaaatttccacattttttttctctttagcatactttaaacttatcctgtggttgtagtgaatggtgcatatcttttctagaggtttctgggtcgatttagcaactaaatcactaggaagtgatcatcattaaatcattgtatcttcttttccttttaattggaaaatgaatggttttccacgtgatttgtgatatattataatacagaaaatacctgccaagggctagtgagaggcttggtgggtaagggggtctgccaccaaacctgacgacctgagttccatccctgagacacatacagtagaaggagaaaaggaattcctccaagtcaaactctacatgggcgtcatgacatgcatatgctcacacacctgccaggccgggctcattgttgcagctcacaggggcacagcagtgtaagcactcatcactacaagccttcctctcacgactgtctgggaagtatgacaaaggttatcgtaaattatgttttccttttcattggacactaaaacattttatttaacttcctccctgatcttctcagtaactcatcagtgatttaaaagtgtacagttctatctccaggtatttgtgtagcctctgtggtttctcttgcagttggttttttaagtttcttgctgtgtgctctgatgagctatcaaaggttgtttcgattcgtgtgcatttggtaagactatggttgtggcctagcatatcttagaggaggctccttggggtgctaagaagatttatttatttatttatatttatttttgcttcttgttcttttgctgaaaataaatggtttatccagtgtaatatattgtttgggaacaaaataaaaaaggggggcctggggccctggggaagaacggaaggaaaaagatgcccacacccttccagagtttccctattctctggtcagtcaggcgtgggagggctgctatctaccctatccactcatccctcggtgggcattcctctatcccactcttcagggggtggtcaaggggcagccctgcctggggacaacccccccccccaagctgctttgctaaagccaccagggttgtgggagagagtgaagagggaagaagtttccaacactgaccagagtgcgcagtggaacttgaaggagcagagcagagactctatagttttatagaaatgcaggggaaagagagaaggttagaaaggaagaagagagagagagagagagagagagagagagagagagagagagagagagagagaaaagacaaagagaaagtgaagaggagagataagtgagagaagagagaggtgagaggacaaaggaataagagagcaaggtgcaggctgagcacccctttttatggtcttcactgttgctaggtaactggggaggagtttagcctgaaggtcagaagcttgggccattgcttacatgactactgaccatgcttctcttgtggggactgtgggaggtggtaccttaggcaggggccggagttccaggagcatgagggaacgcctaccatgtcatgtaggtgaattatgaccatcggggttcagacctcagctcgactggagaccagcctgcaattccccacaatatatcccaattataattttcccttcctctgctccttctatctggatttttctatcttcctatctctttctctctcattcaaaaattaatatgattctatgagacaataataaaatataatatagtaaaatataataagataaaccaaaaattggcacttcagaattggacaaaacaaacagaaggaaaagagcgcaagagaaggcacaagaattagcgacccatgtgttcacacactcaggaatcccataaaaactctaaattggaagcgatagtatatatgaggataagctgtagggtgcctgattatgcttgtctgttagctgctgtggccagagaggagttattcacatcaaaggcccactagcaggctcccacagtcttcagctcttcagctgaagcagccactggtgaaaatcccatgatggagcatcctgttgatggtgcctcccagcttgtttctctgtccccgggcagattgtctctgtaaggagatggatggaggcagtggagaacctttcctattctaatcctcctggctccttcagaagcttcattttgtacccagcatcacttaccaagagccggtctcacatacaaagagcctgcttctggaggataaaaacagtaaagcgtgcaaaaagcatagaaactgagatgtaggtcagaactaattttgtttctcctttttgataaaatgattagaaatgtacagttctggttaagttgagattattgtggacatttccactatctatgagaagctttaaaatctcagactccacattactctcatggaaaataagaataccaccatactgccctacccactgcccataaaggtgtctaaatcctccatggccttggttttgaaactgaagaaatatatacatatttatacacatacatatgcatatatatatacacacacacacctatatacatacatatacagagccttgaccatgaatagctgggacaagacagtacacttaggatgcacactcatctgaatgaggcctctcagaataaaagcagccatagttttaacagaagagtctatgtaggacaggttaggtgctggagaccctaattcagtagcaacaacatcttccatctgactgtttgaacataatgtctctaaaactcctttgtatttgaacataaaaacatcagtgaactgtaaaacattactagatttctaataggataatgagttaccttcttaggataatttttaaatctgaagtctccccctgggttcagttaacaggcattaattatataccaactgaaaaaggcataattcaaattctctccttaataacctgcgtccagactgagatgttcgtctttgtgcaatatgaaaattatggttggacactagaaggttgcatgaggcttgctgcacgcagtttcactgttttcctctttttcttctcattttgtttttgtttggtcttctgttttgtttgtagtgagcatactgctgcatagcccaggctatactcaaattgtacatctttctgcatctttttcccaggttctgggatggctggttggtccctaggcacctgagtatttttctcactttaaaaatcactgttcaggttgttggtcaacaatgttgcagaataaaaacaaaaacaagacaaaaacatgatctcaatcctagataaataagcagctatacgtattttgctaaaaatctaattaaaattgaattaattaaaattgaattatacaacaaaaaagaaactctttagtaatacataggcactgtcagtcattgatacaggtaatactaggatgctgtctgtgtgtaatttagtctacaattttaataaaagttcaaagcccagattattttctacttttaaaatatatctataaagaaaaaactgtgactcaatatatctgctagaaaatattccatacagactttaatgtcaaaatataacatttgagcttgagtgtcactctgagaatggtatgtccaaagcatggggataaaggttctcatggctgttcacacatgtgtgtgcacactcatggcccacagagtgcttgctgagaggttagtttgtggggatctgccatgctctccggtcgagtcagtttgacaagctgagaggcttgaaagctactcactcacgaggcaaaagagtttcacagaaactcgctcctggagtctggcgttctctctaacccatacattaattttccattcctgcattagtctagtgtatggatccacgtgctctcctttagtattaccctattataagtgccttttaatattgaattctgacatagctaaagccagtgttccaacagtcctagaacgtccttgagcaagaccttgggcttggaattcagtactgccctatcactttgagtaaaagttaggtcactgcccttcacaggaatctaccatcaccaaggaagaaagaagtttctgaccgtaggagaaaccagaatagatatttagaattatagctgagttacacctttatacaggaatttacaatggtttaggaagtagatccggctgtggttttagagtattgcattattcatgagatggttagctagaacggaactccctagttagaaccatgacttgggtgtgaaagcccttgccctaggagtgaaaagatctcacacctggcttctaagactatagctgaccttagatagggctgactttgtctcagttattttattgcccagttcctgccagtctttgcgttttcattcctctgttctgtgtatgagtcattaagcatccggttacctcatttgtaccttgtgggtatgtaacccaacttctttattgtcttctgtataaaaagtctgatgctcaacttgacattacattcagatccaacacaacctctcctgtgtgcatctgtctgtcaattcatcctacgctttgcccacccgagacttgagacccatttcacgcagacaaaggggcccagagggtctgcgacagggatcatttctctttccacaatgtggagtttcagggtttaaactgaggtttttaggtgttgtgacaaatgcctttaccagctgcgcctgatagaaatcttctaataagtaatgtatattatagattaaaaacacagcaggcaaattccctgagagaaaggggaccacaccccagggaagaagtgggttcgtgtcctccccagcggctattttggatgaggtactaggagccattacaggttaggctctaatcatccatattagacattggcccaagaccatatgtcaagaagttaggatctgacagttgggggggggtacttcttgtttttaatttgtgtgtgtgtgtctacagtgatctagcagcatatcagaggaccagggagaaagtacatgtaataaacactgctgctttccatgtacctggtagttatattaacgtatttgtcattttggtttgttagttggtttttggttggttggacaaatattttcccattgaaatatatcccaagctatcaattgtttacggatggccttgaattcacagtgtagcctggatggcttatgaacttgtgatccccctgcctcggtccctaagtagctaagattgcaggcaggagctgccagcccctccctctttcatgtatttcttaaggtatccatcatttcttttagcagataaggagatgtaggtactcaagtgctagatttcttgcccagagttacacaacttgtaaacaaaggagttgggatgtgatctctcaactcctcgtgtataccagaatgtctccaagttttaggtcgatcaggataggatggtgacatgctgagcctgattcagtgggtctgggtgtgggcctgatactcatactgacagaatctcctggcctgtggagcatactatgcgtaaaacacatctacaccacaccaccacgtgacaaatctgcagcgttctggagacttgttagcaaggaggggttcttcctattctcccggacagcagcgtgtctgtgcagatgagcacatctggatgttgtgacagaaggaacaagacctccacaggctcagggcagacaaaaccacagcataaagcagtggggtaaggctccttcctcagaggagctatggacaattgatagctgccaagggatggagagtcagttgtctctaagggtttggccctggtgaaatctccaaactcctttagatggtgccactcccaagagtatatgggcatcacatattggacttcctgaattttaaagacatgaagaaatgaagttgggtgaggaaagggagatataatgggagcagttgaaggaggggaaaaatatgaacaagacacattgtgagaaattctcagagtcaataagattgtttctgtaaaaaagaaaaaaaaatgacagtttccttttcatccctcggctacttagctttgacatgccactttctttgactgccctaaggcaatcagagtagccaccatttttagaggaggaaacaattgcttgtaattgtggagcgatctaattaattaaaagttagacctcacaagaaaccccgagagccactggaacttcagcaaatcaaccactggtttgctccagctgctttcacaaatctctatgtgtgtgctgacacttttcagtgggttgcaactcaggactgtgtgttctaaagtccttctaaaacactggaatcattgcccacgccacacctgatggcagacgaagtacaaaagtgtgactctcagttaaggaaggctttccccctgctctattgcattaaaaatcacccacagatcatgatataatgccaattcattaaatcttggacagggcataaaattctgcattacaacaaccttcttggtttggagtagcagggctctcagtatttaccatgtttcagaatcatctgggtgtgttcttctaccacccatgcgtggttcccatctgatgcagatggtttggaggaaaccctggcatttagatttctaaggatctgaagtgatattggtgatggtccaaaattcgcacacatttcagagtctttaatgcctgtggcctttgtgatttttttcacatagacactgacatgtgtataaagtagtcagcagggtcatgtgcactcttatttaatagctttctaatcccccagttgtggtaacgagtcaactgtagaaagagaagcagtttcattcattccattcacgaatttactcattacggattcattcaaatgcttttttttttctgatttcagcataaggttgagcatatactatagtttcaggactttgccaatgaagtgtacctactacttatataccagcaggaaactgtaggtgaacatattcgtccatccattcattttttgaataaatgttattttaatgctatacctcagatactatgctggaatgtgtgtgtgtgtgtgtgtgtgtgtgtgtgtgtgtgtgtgtgtgtgcgcgcgcgcgcgtgcacgcgcgcgttatatgtattatcaaatcacatgtacatatgcatgagtatggatatatatgtacatacacagcccctgagaaaaatcatactttgtcttcctcacttctgaaccagaaagtgatgtcagttaataaaagttcacacattaaacttgcagtggtcactcctaggtcaatatgtggtgggaatgatagctttgtctaaattggggtgcagccttcatgagagaagagccctttggattccaatctagttactactgaaagagcttgccagacattgattgcaaaagatatcaaactaaatttacgtatcaggtgttcattaagacatttgaaaaatgaggcaggagatgagctccatggttaaaatccatgctgctcttgcagaggacccaggttcagtatctagcacccatatggggacttaaatctatccatgactataattccaaatgacctaacgctctcgtctcccctctaagggcatatatgtagtgcacataagcacatatgggagataagtaaatgaataacccctgtttttttaagccaaaaactaaagacaggagacaaacttgctcacgacgtaaagcctttgcccatcacttgtgctgccagactcttcaagtacaacttgaacttgaaagaatcttaaaactgatactcttatctcagtccacaattaagtggcattcttcgcttgataacatataaattcctctgtccacttatctatttttatttttcaatgcatttcaaagtgggctgcaaatgccggtgtgcttccctcccacgcacttggagaagaccaaccaagatgtgtgtttttcaggactgagcctgaatttcttagggatgggacaggtacaatagctcggttcattcagctagtggaaagtttaggtacaacttaactatacatcctgaaaagctgcttcaaccaaaatgctgcctctaacaaggccataaacactgcccacatccatcctcaggagactggatggcacaccctgaaattataaatctccttcatggtgttctgggaaagtggcgagcctttcccctacccaccagggtccaaggcaacatgctgtcatcctaaaaccacatgaaagggacagtgtgttttaatgaattttacatctgtttatttacttagtgtgtgtgtgtgtgtgtgtgtgtgtgtgtgtgtgtgtgtgtgtgtgtgtgtgttgtgaggtgtgcatacatgattgtgcctcagaacaggtatgtaggttccgaggaaagcgctgatatttgttccctccttccaccatgtggggccctgggctcaaatataggtagcaagcttgttggccttacctttacccactgagctgtcttaccagcccaggaatcaggaataaccagtatcctctagtgacctcagtaacatctcctctactaaccccagtaacatctcatagttgaaagatattttactttcatgttaaacatcccacagattttttttaaagctatgtattctcagccgcttgttttgtttattaaagccaaaatttctgtgtccaggtcacaagtgtttttcatttatttgtacaccgtaccttctacaaaacttataagaacggaggtttactgatttacatgtggtataatttcaaagagattgtgtttaccttaactcttggaaagaaagatttaatttttaaatatgaaatcaattttaaaagccatttttggccttattttaaagaaaaatatactgtagtaattccatatgcccactaggtggcagaggttacaagcaaaaatctagtaagagcaactgaagttccaccatatgacccttccttaattgaaattcatgttaattggatcccagtggccttccaattaagtttataaaaaacatatctttggtgcctttatttatttcataatttctagcactttggggaaggatttctccttgttttgttgaaacacatgaaagtaactgtcatagagaggcctggagagaaacatagtaaaagtattgattcctttgagctggacacagaaaatttgtgttttgcattaaagctcacacatctatgtgatgggaaggacttgagtttctcaattatttcaaaaagttaagtttagtatttcacaactgaaggtatttaaccgtattatttattttatattttattatttgcatgtcattctagtgcaacagggtgagttctttggtaattccctcatctttctgtgtgacactatcttagccatagcttactgttgtattaatgttcacctaagctgccactgtcatagaacacagaatgcctgctattaaaactattcagaccttaaactatcataagttctcaagtctcctatctgacctctggcttacttttaatagagtttagtgctgactttcaatatcatctttgattactcagccatggtgccaaaagggcagcccacctggctgggcagagatgaagccaagacaaagcaccatccagcccacagaatcccagcctctcctgttatcagtttccccaatggggaaactggggcttttctacatatcccttggcaaaactgtcagacatcagtcttttgttgtttgccatcatagatgctcagtactgtatcacatttatccccagaaaaaaaaatcctcagaggcccctgggaaatttgactactcaaaaatcttgttaatcagtgccttccttgccctcttctcctgacgcatgtctggcagggtggaggaagcgagagctgcacatttgttggctcctggcctaggtcatttccagacacaacatccctttagcattctggcttggggattccaggcaaactctgttcctcgagtcagggcacgcagacaaggctgttctgggtccagtgcagcctggaggtgcactttagcctttaggtcatttgaaaatgtgtaagttcccagaaatatttaatttttcatcttatttcaacacctcgtgggtataggtggtaattgaaccatgcctgtcccacttataacagcttcctctgggtttgggtatggcttctcttctccttgtcaccactttataggtccagttcgttaactctgatttttttttttttttttttttgtctttcaagaaaaaccttctctgtgtatgacatgtcctgcatggaaaaatctggcaatataggaaaccaatgcagaaaacaaacaaacaaacaaaaaacccacatagcaccataggtaccacccataggcagcacttgagccaggagactctcatttgcgatgtctggttgaacaaagaatatgtcatcattcctcttggcatatgactctagggagattattcctaatggaatctaacttaatgtgaccataccagagcttaccaatcattgttatccatctgtcaaaagatataatttcccaatagcaaaatctaatgcttctagattctatggctaggctcccgttttgatgtccagcccagtaccaacacttattttctcctgctccatcccagtgagagaaggtacactgaagaaacctggacaatcagcagtgctatttgttgacttaagcgttggggaacgaactgatccaatgccacctctgaggctacaggaatatcatgagttcaaggtcatcgatagctgtacagtaaggctttgtttcaaggatgaaaagtagcaagtttaggagggaatgagaacatgagtcagtgatgctgtttatacttctgccttcctttggtaaaatttccagtgtgctctttgtaattacatgccaaaatgtcacagggttgacgtccaggtgacccatggaagaaaatatccctgataataacttataaatgcattacacagaaagatgctgggataaagtcgtcaccagaaaaccttgctgtggacatggaaagcaagtctaaaccagctgtcaggcacttggagtgtggggaagcactgttggaggactataccattatagaggcaattattttataggaccggcattgatgctacagacacttactgaatgcttaccttcaatagggtatagctgatggagtggacaggataacaggctcacaagtcttggcacatttcattttgtccattggtaatggcataccatcataactgtttcgtgcatttacttatttagcttgaaccagaaagtgttctagatacttaccaaacattaactgttttgatcctggaagaaacctcataaggtaggcaatcttatgatccctaactcatgtataccctcaaggataaagatggagacacggcacagagaagtaagtgacttgctaaatggactgaatttgaatccaaggacacctggttccaaagtctgcactcgtacccatcactttggtttttgctgtgacatggaagctggtggcatgaatcaaactagcatttccttctgtgttatttattcagaagcctgtctctgctactctgaaccaagctgagatcagtttagctgtttcactcacatgtgtattcagctaggggtgtctatcccaggacatcgggcttagcagtccttccacagagcctctccttgtctaccactatagcagaaatctgtaaaggctggacagactctctatggtcctttgtttgcattaaacgttgctgttctctcatttgatggaagcatctagggagatccagaggcagtgtgggaaggctttattcaggagcatgagaaagttggagtggaaacagagcacattgtgcaattaacctgacacttcttgatttcacactatgctgagttaatcttgctttcttgacagtttcaaatttggtatttcagactccagaggaattttgaaaatgccataatgtgtagccttactgttacaggaagaaaataaaagcagtatgaagcagaaagttaaaaagatgtttatgatcttaggctgaccctggagaaacatcttccgaggctccaagcgaaaccaggacaacgccagcagagaatggggtgaatcacaccgcatcccttgcacccaagccgccttcccaggctccacacagccagcctgctccaggtaaacagcgggacagtgccatttgctagctctccaaccttcagcttctgggcacttctgcgggcccagaagctatggctgagggatataagcagactataagtgatatgggtgggcaggtggcaggatggacacatggttgactgttaccaagcctcacagatactcacctggctctgctgagaacctaaaacccacctgtgtcattggttgttatttgggggtgaattatgatccatccactaatagagtttgagtttgtgaagagttctacaaacaacttaccagtatgccttagaagcactttcttgcttccacttcaaggctctgccaccacctgattttccagtaaccttaaatgtcctcttatgctaggctgtctgctagagtgtgcatttgagttaggtcatctcatcatcccagtcctcagcagggtgcattctatagtttcatttgggagatgatgaagcacttcctgaaggacacaatgccagagaagggaagccaggtcagagggcgtatggtactactaaagtgcttgcttttagcttccgttcttcacccaaatcatttcaatgcctctcatgttagcatttcaactcactctccttaattgagtgtatgtatggtgtgtgtgtgtgtgtgtgtgtgtgtgtgtgtgtgtgtgtgtgtgtgtgtgtgtgtttttgtgtttctcttaacagacagaagccatcctgagagcaagttgagcttcatgcatcctctgtaatcactcacttccaagaagtggcatgcatttgagccatctagttgagtcagttaataaaacaggagggggataacataaaacatgagagtgtgactctgtgcccgttttcttctctgtcatagtggaacatggaattggtgaaatacagatcttctcactgatgggcaaggctgctttttcagagaatatgttttataaatacaaatccttcttcatttgtatcaaccatgcattcactgatcctctactcctatgaaatcaataataggagagagtgaaccataacaggacacggcatttccaaatgattattatctaccacatgcaaacactttcagggcttctgaactgagcttattgcttctgggaataaaagagaatttgccattttaacatcttgatttttaagtgatactcaaaaaataatttggcttacaggaaacagttaaaaatattacagactctgtgatgcaaactctcctttcccgctaaagtcagcaagaacacagtaagctttcaaaacaagttagtcttctgtaagcttggcctgccttgcaccagggtctattgattgtcctagatttgcacccagggtcccacagtgagagcacttgctcatcatgtctccacgatcaccttccttctgtaacagctcccaactctctcttgtttctcatacccctgatattttattatttttcaaaatgtcccttgcttcctttgagctgcctcaatgttttcttgtcattaatctgggcttctgttttgatgctgtgcccttcttaatgcatcttggtggggacaggtaatgttgccatgtcccaaccctaggtcaaaatggcttccctctgaaagttttgcttcccactcctctgtgtagaagcattttgagggtgtgtaatacctgttacacctcacacttggcacagtgatcatgaagttgattggtctttggtcagcattcactctttaatcatgtcattcctgatcttgccagaaggtggcagtagtattgctgagattgaatttcttgttttggttcaagtagagggatgtctccctatctatggagaatgcccgtagttactcatcagcatagcattgaatccaagttacaaactaaagaggttttactgtaattatgttgtaaacaactttctacaactttttagccatctctctaaagagacttagaatttgggggcacaggggcaggacccccccagtcctggagatgaaacccagatggccaagtgctcttctaccccggggctgcacctccatccacaaacatgcttggaaaatgagatagaaatttggaagataaagaaggccatctctttgatctttttggttgcagggtctgtgaaggcacctgccaaaacagaagatctgatccagagcgtgttaacaggtgagcataaaccatttttcctcatggaatttgccacatgaacattgcacagtaagtgtacagaggggagaagaaacccggccttggattacacctagtcagggacagtttccagaagatgtcacggctcctggcagtcctctgccttttccctggtgtttaccatgactgaaacgtgtcagctttgcaagaatgtgcagggctgcagattggggatatgtaaactttatccacacagctatatttcaccaaaaatacataaatcattcctagaaattatgaagaacttacaaggcaacaaagcacgtttttaaagggcttccatgggaagcaatacaatgctgatgaagaaaacaagatactgaaatgttatctaaaaatctgcaagtgtatacacacagggtctgcaccgcaccctatctgtggctatctctgaacagttcacccattagtgatatgtgtctttatgcagatgagcattactttttacatttggggatattcccaagggatagtcttttacccggaggctttttcaaagacaggttagactgtctttttcttagagggttggagcacggggagttctgtttctagactgtttgtggctcatgttctaggttctcatgaggtggaatcggctaccagaaaatgcagaagtttctcaggattataaattcttaatgcagccattattacgcaactgtctgaagtcagtttgaacctgagggaaactgttaaataaatgtatctagttctctccacaacttcttccttcaataagaagaaaaagtagttgtcaggacagacacacagtaagagaaggaagcactgtttaaaggccttggtgtttagcaacagaaattaccattccagcttccctgtttatgcacagcccgtttctatccaggtttgctatggtttctgatatatattatttctgaacctcttgacagttccaaatatttatggtatcttttgtggtgttgttcctaaaacagaaagttcaaatcaagaaatggaaacatgtgaactctgacttagctgggtccaaataaatgataattcattgaagttgagacaccatacattgaaaggctccccaaaaccccattcttgtaattctagagaaagcaatagagaagctagtgtgggatcttgacttcagaagtgagaactcattttacaaatgcttattatagaagtgatggagtgtgcctatgtagtgatttaagatcagactttgtcacattgaccatttttttcctcaacattggataaaacactacagtcatacaggtggccctagccctgctggagcctttgtgaaagttagattaaaggacactttcttggcacacctgactgtcatatcccctgatatgtagggagaaacctacggtgtgtcccttgtcagtgcatcccctgaatgacgctgaacctgtgtgatcatttgctaagtcgctttagcagtggctgtcaactcgtgggtcatgactcctccagcaaacctccatttctagaaatatttacattatgattcatgacagtagcagaattatagttatgaagtagcagcaaaaaacaatttatggttggggattaccacaacatgaaaaattaaaggtccacatcattaggaaggttgagaaccactgatctaaggcatggtaccaaaaacaacaaaacactttccatgatttttattttatttaaccatcagaccagcctttagtagaaatgccatcatccctaagaaggatgaagttggggcctgctccattttcctctgatgtgatatgttctgttcccgggcatagtgaggctaggttattaactctgcttctctgcagaattttcctctatataaagggaaatcttcttttgatcatcccaaattcacaagaagctggccttcatggggagaccagacccggtgtgccatgcacaccttgggttctcgtaggattgttcagaagtcatactgaaattgatgtgcgtgcttttgcttggttgtttccactgctgatctactttccctctcctcagctcacaaggagccacaggcacacaaatccccattctagactctccttctgggaaaaccaaacttaaagccccaaagaaggaactcgctctctgcaatgttttgttagcacagtcgttagctagtggccagagcagtttactgacagttctgacatctaggctgtgctcttcagccactcttggaaggaataagctgttcctctctgaacaggatgccactgtccctacccctggactctcagccactctgtcactcagctcctaacgctcctctgttgcagaagtagaggcgcaaaccatcgaagagctcaagcaacagaaatcgttcgtgaaacttcaaaagaaacactacaaagaaatgaaagacctggtgaagagacaccacaagaaaaccacggagctcattaaggagcacacgaccaagtacaacgagattcagaatgactacctgagaaggagggcagccttggagaagtccgccaaaaaggacagcaagaagaagtgagtccataaagagatgctgccctggcggggggttgatggtttatatgctgtgatgccacagggagcaaagtcactccacaggctccaccctgcccttcttgagtattttcagttcacagttgcttataagctaaatttagttccctccttcctaccttccctctcttctcccctccccgctttccaggctagtcttggctggctgaattcctgtgacccttctttctctggtcttggcatagctagtactttgggtatggatttcttcatttgaacaaattctggggtagatatacaattatgcttccagagcactagctcttggctcagatatcgggtccctgatgcccccacccctaccccacaccatccccacacaccatagcagctgccaaagtgtgggtatggagttcttatgtacctagaatcgagttgaacagactgtttaccatgaggaaggagaagcttcaactttcttttgatgcctgaaacccgtaatggcctgacagatatcctggggtctggggctctcacagtacatctctcatatactcaaagcactcagaatgtggcagagagaagcaagtctagcatagctattgagtaatattattattttgtttcttgtgccctgtggataattcaatgattgtatacaattttacccttaaacagcaaatatgcagtcacgtttgctagttagttttatctcagcttataaaaactagaaaaatctcaatgtacccatcaaactgccccaggaagtgtttggtgcattttcataattaatgtttgacatgggaaggctattttactgtcagtagtgctgagttaatggccccagggtctataaggaagaaggctgaggaagccatgaggaacaagtcaataagcaacatttctccatggcctctgtattagttccttcctccaggtacctgccctgacttccttcaatgatggaagtataagatgaaataatcgctttgctccctaagtagttttagtcacggtgttttatcacagtaacagaaacccaagacatcgagataactcgaggaaaatggacaacacatataaccgtggtacagcataaccataaagactatcaaaaagaacaaaattttgatgtagaatgacctcagagaagataacatcccctgtgtttttaaatttttttattgcagtgctaaggatggatcccagggacttgtgcatgctggacaagtccttcactacttagctgatacccactctctagagttttgagacagagcatcaccatgtgtagctcagtttgccagctaggttttatgatgacttggcacaagctagagtcatctgagatgagggaatctcagttgagaaaatgcctccataagattggctgtgggtaagcctgaagggcattttctcaatgattgctttgagaggactcagcctattgtgggtggggccacctcttggctggtggttctgggttctataataggctgctgagtagatcgtaaggagaaagccagtaagtagcacaccagcccccccacacttgagatggacttgaagtcataatttgcctgccttgttgtccaaaagctgagattatatgcaaatgtcaccacacccagctgggagagccattctgacaagtcacagtatagaatgaggtgactcctaaggaatcaatcatgcacaaccatagagtgataggaggcagtcccaggccaaggggaagattcaaagccgggaaaaattgacctgtttcaagaatagttcagttggcaaaatggataagacctagtgagccccatgtggtgtgacacaaatgatgtctagcagctaggagagggaactgtttaaccaaggtcttccagagcagaagcaaatgacaagtaattcagaacttatgtggttgagtgagaagccacagaaggaaacagtttgatgaaatgtctgcagtctaattaatagcctcagaaaatattcatagctgctgcatggaagatgaccctttgctgcacttttgagatgtacatgagctgctatcaagtctgcttcagtcatgcttggagcaggtgatgctagagtcatggtgtctagatggtactctgtcaggactggggactcagagcaggaacagagagacctgaggggacactctctcaggagtccagatgggcgatgatacaggtttttcctaaaaaagaggggcacggaaatggtagcaaaggctggattcttgccttgttgtttttcctaagagagtttaggatgagaagtggatacctggaggaaagaagacacggcccatgtggctctgtcactgccagctatccttgtagagattgaaatgtatgtgatcacgatggccatatctgttcaagaaactccattctccagctaaagccatatggctcagagtctgcctcataggagcagcaatgagaaagatgtttttaggagcctcttcagagctggggtcatgggtaagagtttaacaaattactcttatgagatgtcctaatggttcctgttaactgataagtggagagatgtggtcagggagacccaacaatcatcagagatgtaggaaacgggtgtagcgctcacagtcagagcttttctagaaatgggtcaggggctctcaaagtctttcaaggtcttgacctaaagggaattatcactgctgagaaatacaacctttttctctagctgaaacttctatatgccgtcctgaaacggagtgtgtaagccacctgtccatggttgggaacacagtaggctgtgatgcctccttctcctcttactgtgctctgaatcatcatctttctcaccaggtagagaaaagcaggatgcagcttcaaatccatattgtgacatatgatgtaatgcgtgctcaccttgaaaacacgatcaaaatgcaagacttgattttttaaaagtagcaaaaatcacctttccttagaggttgaacagacgtagaacgatagcaggtgagatgtgtcactccttctcgggaagctaaaggctaagtcagcatttacctcttgctgcacagccagtgaaggccaagtttgctctaaatacctcctaagaactctaaagatgcacacatttatatgtttatttgctcttataccatatcctgaaaattcctaatgcagcatcaaaataacttcacaggagagatgtgtatgtaaatgcctttgtagcccacaatgtacaaagaggccagcatatagaggaagccaggcagggcttctgaaaccttctgttctgcttgaatcccacatatgctgggtctctatgaccaccagaaccagcagagtagtgatccacaggaggcaagaaagtggtttggtttaacatgactaagtagggtattgcttcatgcttacagagtctgacaagtagtttattttaggcatatttaagcacagcacaatctggtgaaaactaactcctagagaaagtacccaaggagctacaggggtctgcaaccctataggtggaacaacaatatgaactacccagtacccccggagctcgtgtctctagctgcatatgtagcagaagatggcctagtcggccatcagtggaaagagaggcccattggtcttgcaaactttatatgcctcagtacaggggaacgctagggccaagaagtgggagtgggtaggtaggggagtgaggggggtatgggggacttttgggatagcattggaaatgtaaatgaagaaaataccgaattaaaataaaataaaataaaataaaataaaaaaatttttaaaaaagaaaactaactcaacctcctgtgcacaacacagcacaaaggaaactaaataaagattggacatacctacattaaaactctttatgaactacatgtgataccttccataaagatgggtttataaagcttaggctgtctggatgaggatcccgtgtgttctcagccatacaaatagcgtaaaggtcaccaggctactaaccatatccatgattaatccctttctttgaaggaacaactctgtgtgtttaatattccaggttcgctaatatttatctgtgagcagaaacctccatgccgcctacacacagaaagggggcacggagggagagcaacagggaaagagagaaagagggagagagaaagagagggagagaaagagggagaggggaagggaagggggaatgggatagggagagaaccagagaaacagaggagaagggagagagggagaataggcctagacatagctgtcagcaagtatgtggaaactttatggaagctaaaagcaacacacgcgcatacacatcttagacaggagccatgagccacatgtggctattaggcccttgattaggtcatttgaactccaggtgtagctcagtggaaaactttacatgtaacccaagcaagaaaaaagtgcattttatcagtactatgatgtactcaaactataaaatacataccagatttctccgactccaaaagaaaactaaaataactccgacatcttttggcttcttttaattggttaaattaatatatacacatacaattattcttttgagtccagagattgccttgtaactgaggtggcactttgcaatcagtctgctttgagttcctgaatgctaggattacaggtgttcctcgcacatccagcttatagcacatcttgttaaaaattagtatcactcatttcccatttataggcggctagtacaagtgctatgcatggtgaactatcacactcatagttcacattgtgtttctgcaatacagcaccaactctcgatgccgtttctgtccttgaacactgaattaacctcttatcctttgaggaaaggaaatataggacagaccattctacttctctgtctaaagaaagcgtgcatggtcttccctaagagaaaagtgctttctccgtatcagatctcccaaggatttatttctagaagctctggagtggctttgagcctgtttcgatggaagatgtaaaaggattacctctttttagaattgtccaccaaaaagcaaaaagtctcaaaatgtttcatatccgaagatggatcaggagaatccaagaccctggggtcctagctatgccttcctgtctcccatctcccttaatctacaagtaaatcttacagatttctctgagtaaccattgggtagtgtgttcagtacagcattctctcattccttcatccgtcatcatctccctgagcactctacagaacgtgaagagccctttatgcaaaaatagtttctgtctcgatgtgggattcatatcttctccttctagtggtttaggtttttacatccaagcccagtggccttgagaggaggcattctggagcctcccaagcacctggtaccaccagcccagttcttgcatttctctgtctgtgtctttgcagatctgaacccagcagccctgaccacggctcatcagccattgagcaagacctcgctgccctggatgcagaaatgactcagaagttgatagacttgaaagacaagcaacaacagcagctgcttaatcttcggcaagagcagtattacagcgagaagtaccaaaagcgagaacacattaaactggtaagccacgaagcatggttgtgtttgtgcagctgcagggctctgtgaaggagcaaatgtttgctgctctcagatgacgcacagggcacagggcagaagtgtatggcaacagcgtgcagggggcagaggctacccagtacactaacactcctcacatttgatgaatccctctaatccttccatggagctatgcttcgtgtttacctttcttggattatttttgagcatccattagtttgagagcatctttgagagggcacaagggagtaaaacattctttccaaagtaaagcaagcactgcaaggaaattttcgctctacttcagcatcactgagcttttcaggaacaggcatgataaaaccacccactgcccacgatcctaattttccttcaaagactcaaggctacctgtgaaagcgaaggacaccctctttgttagtgatgaggtttgcctgccaaaatattttctcttggatagtgaaagtcttgatactgtttttgatgctttcatgaagagtggaatatttaacacttagtcacacgcagaaacacacaaagtgaatttaggagttaagtactagccctgaaaacaagctaatgccagaaacaaacagatcggaacaaatagccttgactaaaatgggcagtgtacttaggaaatggtttcatagaattatccatccttttgttctgagtctgtctatgtaagaaatgctgcactctatgaaaagacaacctataaaaggaagaaaatctttttttaaattaattattccattcatttacatctcaaattatatcccacttcctggttacccctccacatgtctcccatcccacagctgacctctccccctcccctttgcctctatgagggtgctccctcacccacccacactctcctgccccactgctccaggcatcaaacctaaacaggaccaaggccccccctcccattggatgtcagagaagaccatcctctgctacatatgtaactggagccatggattcttccctgtacacttcttggtaggaagaaaaactttgccaactatacctctaacaaggaattaaaacctataaagaaccatacaatctaaacaccatggaaataagccattgggtcagtaagtgtgcaaataagtttaatagacagttctccaaagaaaaaatgcaaatgaccagtaaatatacgaaaatgttcactatcttttatctgtcagagaaatgcaaattaagactacttttgagattccatttcacccaggtcacaagggctagaagcagatgacaaaaaaaataatagtaagactgggggacaggacaaactgtcacaagctgctagtggaaggtggcctagtgtggccattatggacatcagttacacacgctctcaaaaaaacaaaactagcattcccatgtgactcagctgcccaaaggagtcctaactcaacacacctcacacacctgcatgctcatttttatctttgccccattcacagcagtctgtagataggaagaggccaagatattcattaaagggagaaaggaaggaaggaaggaaggaaggaaggaaggaaggaaggaaggaagaaaggacgaactaggggaaatgtggtaaatagcacagagtgttacatggccatagagaagaattaagttatttctcaacacagggaaatgggtgtaactggagattgtcaggttcagttagtccagactgaaagacatagaacatgttctctcgcatgtgtgaaatttagatttaaatataaacatctggcatgaaaacagagcagggactctaaaggggaaggaatgggaaaagaggggagaaggagaacaagaaaggttaatgaagacagagacggaatagcttatttctctcatagaagttacatttgtgaataagccacacatgactgtgagtgtgtgtgtgtgtgtgtgttttgtgtatgggcacccacatcataccttacaactgcttgtaactccagtcccaggaggtccgatgccttttctgaactctgctggtatgcatgtacatggtgcacagacatatagtcaggcactgacacacatacataaaaaaaatcaattatctttttttctaaagatcgaaacagtaaaagaatgtctgggagaggttgagggtagaggtgaggaaagaattgccttgacagatccaagagagccaaagtcaattttaataatagatgacagctgtccttcgcgatccaaccattactatctgaatttctccagtaagctatgactataaccatgaagaaaacagctgtgcattgaacactcactgctgacacacatactggataattaagccagttataggaatggcattgggtctactcctcagagcactcgtaacctttcaggattgttgttggcactctttccatgtggtgacttttccaaggtgttatgactagaaagtagtgcatctgtgatttaaactttgtccatctgactatagagtctctgcttcctaaccactacacagactcctcttctacttcatgtcgcatgccaatgttgtgatgaagggcttgctttgtgttgtttgttgctcatgtgaaacatagccatgcatttcttttggatggcttgcattctctctctctctctctctctctctctctctctctctctctctctctctctctcttacttgtttcacatatcacataaaatgcaaaatatcagcatgctcacaattaagaacaaccatcaccataatcaacactaacttttatcatcccaaaaggaaaaaaactactttgtccatttcaaacaaatgttggacaaaactcgcaacaattcttgcccttctggagctaaccatctaaaaggggggggggggggggaacagaccataagcagcatgagttggcagaaaatttaatatattaagtagtgagaaggatcatgagaaaaaataatattactattaggaaatagatgtttgagactctatcccaaaactttaaagaaacttggcaggaaggactgacagatgaattgataagacaacatttgagtcctgagctgaaggcctagtccaggcacacacatggaagaaggtttctagacaaaaggagtgacacacaaagtgtctaggctggatgcttggaagactaacagagtggttccatcaatattgagtaaggcagatgatatttaatgtagaggatannnnnnnnnnnnnnnnnnnntgatatttaatgtagaggatacagatctaggatttgggggaactgtcttgtgtaggttgtcctcagaactaggtagataccatataagggtgtcaggctgagggaaggcctatttttgaacaagtgactgacatggaatagcatccacaaagaccattctgaaaatcccttcactccatagtaagaactggttttccaggaagggatggtcccaggctcaggtgagaccaaggctggccccagatactgtgaaatcctgggttcgtcaacagaggactcaagttgactaacattatgaatactactaaaaagtccagacaacccattcatagtgacctggacaagactccattcaccaagaacagggtcatggctatgagaaagtgatatagtcaaataaaggggggaagctggtattcatcagtgattctcaaaaaaaaaatggaaagaaagaaagaacgaacgaaagaaaaagagagagagagagagagagagagagaaggagggagggaggcagggagggagggagggagagagagagagagagagagagagagagagagaaagagaaagaaagaaagaaagaaagaaagaaagaaagaaagaaagaaagaaagaaagaaagaaagaaagaaagaaagaaagaagaaaggggaaaaaaaagaaagaaatcagaaagtgcctgggaagtaagccatagcagccgaggaagccctcttgtctgtgtgtgtcctgggaaagggggtgaacttcagctgcaaatgggatgaaggagacactacagggaagagccacactgaagagcgtggaaagaggctgaatctacttactgtgctgtgggagatatcaaagtcctggcagaggtgacgtgctagaatatgtgccctctcccttcaactgaagaaaggaaacacacactctgtagacctaagatatcatacaacataaatatgtgtccagatcaacataccccaggttacaggtcaaatgttaaccaaccttctcaaaatgctccctggctcacggcagtgtttgtgagcttggagctcagataaaccacttaggaaggcttttgttaagaacgctgagacccagactccttagatctggaaactcgcagcttatttcaaggccatttgacttctgcagttcacactccttcactccccttccaacacgaataccagactttccaattccgaatgtaataactggagattggtttgccggagacattcttgctagaaagctgactgaaagtgacagttttatctttggtggtgtgtctggatgatgagcgggctacccaggctagattagacaaacgccaagtgccgcttagaagtcagcaggccccaggtacaggggtgatgggaaatttaaagagaagttatttcatttcctaagatggatttaaggtgagaagtgcatggcttacagtttttgcatttcagagactaagaagccctgacatcaacaaactcctaaccaaatatccactgaaaacagtaacttcagcccaatattctgataggtgccaaagacaaaataagtaaaatcacttgaggaggacgtgacatggaatttcaacagtcatatcaattttaaaatgaaatcagtcataaaggtgtcagtaagctgacagaaaagcaaagatgtggcaacagtttaccaaatctggaaactattaattgccattgaggccattgttcctattaacacaggagatatgtaataacacaatttgcatagacggtagtttcagtggttttgaacctgttcattcaacaggcagattgcaggtcccatcccaggtctgctatctcatgttctgtgtttcagctgagtcctgggtgacactgcatacactcaagttgaagaggcatgataaacacctgtctgggttcaaatcagtacattttagaatcagccaaaagttcgctttaattaaaatgggaaacactgcgcccttcacaacttgttcagtgagctggctggctggcatctgtcatggctgagtatatctctgctggggctgcctgcccatattcacagtgctttagtatggatgtatgaagacacagatggaaccccaccaccacccattcaagtctgtgagcctcatgaatggcctgagtatttacactaccaaaggaccctggctcctagcaaggaactgaagctccccctgataatgtcttatgcacccagaccatggaaaaaaaaccttgtgttttctttatgccactcgtataagatcttaacttgaaaaacttatttttattgtatttgtgtgtctctgtgatggtataccgtgtgtgtgtgtgtgtgtgtgtgtgtgtgtgtgtgtgtgtgtccatggagacccaaagagggcatcctatctcttggagctgaagttactggcacttatgagccacctgttgtgcgaactgagagctaaattgtggttccatagatttgaatggtctagaattttttatgtagactaggctggtctccaactcacaaagagtcaactgcttcttaaaattgtattaggcttaaaattgtgcaccacatcactggtgaggttttacatttaaaagtcactagtaagtgataacacttgataggagttccatgttattatcctcagtaaccgtcaatagttagccctgcatcacattcacagctgcaggatagggattgttagggttttgtgatagtgttgatagtcttatttctcagtcagaatgcttggcctccactttccattctttccttttttttttttttctttttctttttctttcagtgctgggaattgaatctgagcctcgctaatactagactagcactgacccataactccagcccctcacatatgctctgctcatccatttcttcctcatttccccttaactttgtacacgtcctcgtgtcagtcatatgagcagctattctaagacaaatcaacataagcatgcacagccctgaatcctctaataacctgtcaaccccaaaggaccaaaagatgcatttttaatccagagctctgagtggttgtcaccacccatgagtagaacacctcataggctatgataatgatacaggggttagaatcaaataccccctcacgggacattgctgcccactgaatttagaattcttatctgttcgttgaagagaagagtaattatcagtccattagactgcagggaagagtaagagaagcatgcatagaatactgtctacaagtgaacatctttattttgtgtgatatatgaactgcctaggaagtctgtacttcaaactcaaatgtgttgtcatgatcgagctcctggtacaactggagagaacccacggtcttccttttgacgatttgtgctgactctgtgctccagcttgctgtgacactctcgagtctcctccctctgtggccctgcctgagacacacacgccagaagtaattacagggtgggcgttcaccatggtttgctggggtcctgttatctgtttttctctcatgttctgactttagtgcagaatcattttttattctcaaaaatgaaatcatctatcgttccctaaaatgctaccattttttttaaccaggaatgacaaataagtaaaggcttttaatagcagaacaataaatgaagtaattgtgaacatgcattatttgtcagtttttctatcgttccctaatggagttggtcacacacacacacacacacacacacacacacacacacacacacaaagccccacaaactccaaaaaaacccaaaagtctaaacaaaccaataaaaaacgccaataagacaaaaatagaccaagacaaaacaaaaagtgcacacacaagaaaatggagtctattttgtctgctccaactacttatagacatggaccattcccttcccttttgcagcagttcccaactacaaaagacttcctgggtagagcatgactttgcatctacttccctctttcagtgcagggattttgtctggtttgaacctatatacatcttgtgcatggtgtcagtctatgagttcatcttatatgcattattccttttatatcaagaggacactgtttcttggagtcagctaccaccgctggctcttaaaatcttcctacctcctctttctcatagatccatgagtcttaaggtgaggggggattcgataaagacatgctatgtagaatctgagtcatccaaaggctgtcagtatctgcacattgtccagttgtgggtctctgtgttaattaccatctactgcatgcaaggagaggattaatgcaatgtcgaggattaagtgtttttctgatctatgagtatatagcattacatggcttttttttctatattcttttagcagagtaatagtagtagattttcacccagggcatataacttatctaacttcagggtattggacagtttataagtgccaggtatgggttccatcccatatagtaggaattaaaactaatttttaaaaaatggttgattactactataacaattgtgccactattgcagatgtatatcttgtatgaaagtctctattgtaggtcataggttttatagctgggtgatcttgataattcattttctcttctgatacggtgcaaaatgccttccagtaccgtgaatgctaatcaataggggtgaagcctcaaatcttgaatctctgtttctccatgttcaatgatagaagtaagttatatcttcagcaatgtgaccttactcgtgtgtgtgtgtgtgtgtgtgtgtgtgtgtgtgtgtgtggtatctgtgttcatgtattatgtattttcagaagcttctacagtaataggtatccttatgatttttcaaaaggcttttattgttagctgtctctccctatattccctcctctaccgtacccgttcatcttcctccccccatgtaatcctcctatccaggttccctttatctctttataacactgcactatttgtccttccttggaagatcttctcatccccactggtcccttactagttccattcctctataggaactctctcaagagttcttctttttttattatgttgtttaagtcaagtcataggacttgtcaatagttagagaactagactcttcattttgggcagctgtcaataacaatgcaaagtgggagtgcagggaaaggcatagattctgagataattttagaaaaaaacaacaatctgtgtacatcccttatagttcaaatgtgagatttaataggaaaattcatggaaacttaaccaagtggctggaatctggtaagacttctttaccacagataatcagcgcaggactgagggaaggcacagtggcttgtgttctcacatatgtaccttttgataaaactatttcatctttttttggtatctgtatccctatttctttccttttttccaattttttattagatattttcttcatttacatttcaaatgctatcccgaaagtcccctataccctccccctgccctgctccactacccacccactcccagttcttggccctggcattcccctgtactggggcatataaagtttgcaagaccaaggggcctctcttccctgtatccctatttctaaaacaagatgtttatacaagaattcttagaaagtctcctttcactaggacgttagtctcatattatagaatataggatgactcacctcccagagatttaaagtaataattagaatgtctagtttaaagcaacggatttttaaaccctggtctgtctgtcttctctctctctctctctctctctctctctctctctctctctttctctctctctctctcatacacaatatgcatcgtcctgatttgatttagtggtgctgatgattatttagtaaaaattaaagaaaacataaatgagcagcgaaacccaaggcaaggcagagaatagctttggtttgtgtcagcataaaggagttcaggaggaagatattcttgtgtaagaaaaattctaaaataaaatccacatgactgatctttagtttgaacacctggaatcgcaagaattactgcaattcatctggaaaatgatatattttgtatttagagaagaaagaaaagatgggcatgatacacatcttcacgggcagctcttctgggccttccatccaaacggaccatagagcccatgatttataagcaagttacaagcaagacaaatgttatctcctttagtcaggtccgcatttctaactagctaaaaacccctatttgccatgatggttatttcaagcaattaatatttattttgtttattctgaagtggcctttgtggcttttagaatcagaaggtctaaagagctgcagtggcacaactcatcatgtgtcacttagtctacaaaataggctacagctcctgcgtcagacttaccaatttgtcaaaaggtattcaagtactgtaagctatagcctcatggaagggtagcaaacatgtcctttaaggaagcatatgtgctattccagtcccatctccccatagctaaaggtggcccttatcatggtacaaacccagagtgaataagttagatgaaaatatttacactgaatagagacgcagttcagactttcaagtttctttctggaataaaggaaatttcatctatgaatcatgtaaatatgtaagtacaaatatttgtctagttcagtggtagagtactttcttgtcatgtatgagttcccggttctgaccctgagctctccagtaaacataaagcaccaacacatgtagggtcaagtgagtaggtatcaattctctttaattgtggaaaataaaaatgaataatggttgcctgggaatgaaagactgttttagagagtaagcaagatggcagccttttcagccaaaactttcatctctgagaaattaatggagaaagtcagctcactgtgaacagggctctccagtgctcacagtcagactgtctgtgatactgtaagacccccaaaactggggagacttctgcttaagtcccgagatgagctggccggcaccccaataaccagaaaaccacacctgatgcaaattgtaagaggctttattgtcagctagctgaggacgaactcccctgggtaacggtggggggcttttaacagctagctgaggaattgggaggagttgggaggagagttgggaagagttgggaggagtttggctacagctcttctctagcgggtgtccttggcacagggagccaagcaagcgcctggctgggtctcaccacaatcatcgcatctctggctgtaaggcacagaaacaaaaaggctttttgctggctatagagaacaaagagcttctttctgactgtattttagagatcagggaaaataagcttggggaatgtccaggggctttacctttcagggagaaacgctttaagtcggggtctcacaataccatagatgtccagcaaggagttgctggattcaggaatgaagaatttccaacttcagtggtccagactccccagagtaaacatctactttgtctttaaactctcagtgttgtgtttgctctttgcatcactacataactgagaagttgagcagttcttagtaaaaaatcactagagggactttgacaatcatcaggaactaatgggagcaacaaaggagggggaactgtgtgggagcctatttaacactgggttaacactggtcatctacctcctaaagtcatcctgctcagaaaagactgcaaacttctatccacacatcttttatcctctttgacttagcaactgggaattgtactcatctgtggaaaaaaaatttccttcttccagtgactaagccaatagaaatttagttcacagttaaaaacaagcatgaaattctagtctctggggctttaggttttttttttttttttttaatgtgtttggtttgttttttggtttttgattttttaaaattgtttggacatttatctaggggattgccataaatagtaaacgaagtaaaaaagatgtgtctgttagaggaaaactaaattataacagttaaaattaaacattttatgtagaattccagattaccatatggactcttggttcatttcctaggaactctatatctctgttcccttgttactttgtttgtccctggagaagcttggagatcacacttaactccaaaagctaatctcctcttctcttaggtttgttaaaagtgtttccatcactacaaaaaaaccactcttctagatcctgtgtttatatctcatagagtgaaaactttgaaccaaaacccaagttgcttcaccttattgagggaacaatagagacatttttagttttgggttttttttttcatttggctggttggttggttggttggttggctgttttttttggtttggtttggtttgctttgttttggtttggtttggttttgtgttttggtttagagtttttttgtttttgtttgtttattttttgttttcttttgttttgtaaagtttctttagattacaagagttagaaacttacactggactaacttgaacaatagtatacactaggaaaaaaataaacaggataaaatcattattcttaaaaaaaaatttgtggaaatgtaaagaagaaaattaacagagatggatccagaaacagcttactcaggaagcctatccagagacttcttgtagccctcatgtaattattaccactgttcccccttttgctcccctctaattttagtgttatccttattcgaatggggacaagacagggttttcatttctttctttattgacctgtaggtgagtcttagagaagaacgttactaggtttatgattggccagccttgttaccttagagaagtcacacatggccagaaggcaagctatgattagaatatgatttcctggatcaatgactttggccaaagaatgggggggtgaagattacaacagtttccatgggaaccaaacgtgaaccagaaaccagagcaagctcttcccagagaaacagtgctatgtgggaaagcccagatgggcccatgccttctcttggtgaggtaggaaagagacccactgtgtatgcatatatatcatctacttaacagacactactaacagattgtgttggttcttatcctgctacctagatacaaacagatacaagcatcttaattatacagatttcagataagagttgctgaggtacaatggcacaattcaagggagcctacaatcacagaagtaattttttttgtcctatgtcctgttcacataggactgtcactgaaaggatggaatagtgtgaagggaaagtgtacacacaggtgtatgcacacagttctggaagcaaactattgccttgtttattacaatatgatgaatgccaatgttaaaagagaatctgcaaattgaaatatatctggggatagggccagctaagtcttggagacatataagaagggaaaaatctctgggctgcagtagaaaagctgacatgaggctgcagacagggaagaaatgcttgcaagatagactgcagcttgtaggtatgtgcaccagggttcctgttaccagaaagctgtgctgtgtagaaaaatttacagatgtctgtgattcagtggatgatgaaactacccaagaaggtaggggaaagccttgcacattcttgagttgaataaagatgcctgatcaaaggaaaagtcctgtctctgggaacagaggaagtctctgctcacttatgtagatgctgaggtagggaagtgaggagcatccacagttaggcttactaggcaaagacaagagggactggttctgggaggagagagaaagacgaggtttttgcacagagggagtttatcccataagaccaggcatttctgagaaaaatagggattttttttccgatccctccagaagtagaaaagacatgaagagaagtaaagaaacttaatttagtggggaaaagcaaaccagccaaatgaaggacctacaatatggtatatggtctgtcaggaatcgtgtgtgtgcttcccaagctgtctaaaccactctggttacagagatgagggcactccattgggagtagtgaagagaatacaaagttccaaagattctgagacatagaccacacaaactgaaatggcttctttaatggtgtcagcatgttcctcaataatccagacagggttcttcaaattccaaggcgcacattttgtcctaggaatcttgattctaggattacagattctgaattcttggtctaggagaaggcctgagagttctcgtttctaatgtgtgtccttatcacgctgaggctgttcatcagaggacacatgagtaacaggatcaaagtacccaggggaccacgtaaggatccacattcccggacaaggttatggaaatactcatttaccagttcataggtctgggaacacggccttgtgatctttgtccttaagaagtctccccaagtgaatctaatagcgcaaagtggggaatctctgaataatttctgtgatgcatgtgggataaatgaaacaggggacaggtcctctgggggggtggaaggaatgcagaggtgaggtgatagcctgggtcaatgtaaaagccttctgtgagtccttggggacagggacaacagcattgttggaaagtttgattcctggcactgctcacagtgtgatttcctcaactacggcagctgtgctgaggccatctctcctgaatgatggcacgggcattctgtggcccatgctctccttgatagctatttccatccagatgcggggactttcctgtttatcataagtgaacatggatctctctaagcctctgacaccaacactggggttacacacagaaatgaccatgcctgctttttacgtgggtgctggagatgagaacccaggtcatgatgctatcgaagcaagggctctacctctggagccatctccccagccccttgaagggatttgaaaataacttcaaaaacacagggaagagcagcagcagcagacagaggtgaagagcccagattttagagcctgcctgagtttatttgtcagcatttagaatgttttagctattataaagagtatgaggatggtttacagtacacaggagtgtatgcgaacattatggcaagcgctataccatttagcataaggcattcatggatttgggtgcacaataggggtcctagaactaatcttccttggatcttgagggatggctgccttgttactatgagagatattacttatattagactagttagctcatcttgttctgtacatttggaggaagaaattcgacactttgaaaatagtagtgaagtctctcaaggaaagctcaggccatatgttttatgttccagtggaagggctgaggtctgttgctccagccacctgaggttccacagactttgtgtggaatagagagtgagggttgatcagcatgaaagtttactctcaagtagttgacattcattaggcgtgtactgaatgtgggaaccataggagtgctgatgatccaaagatacagtagctgctgtcgtgagtcttgatccaagaagaaaatatgcatcacatgatacggttattacattctcagcacccaggttttaagagcagcagaggaaagcattcctgatgctctctgtgtcaactgaagctacctcaccaggacattacatcattttctgagatgggtaactgatgttaatctcaaaccaagtcaacaacagcggcaaaaacatacccagaaacacagaattctgcacggctgactctaatttacttattttatttaagcttcacactacctactagaggaaaaggtagccacagtatgacttataatcaagaaaatactggttcagaaaaggtagatcttagctcaattcataccttcaaagcttattgccactaatctatatccccagcccccaaatacttttattgcgttacagagtagaggtaagaacccaggtccacactcttagctgtgtttgtactgactgagccaagcttcaggaactagaatgacagtcattcaattagaagagaaaatcagagggatttcatctttaaaaaaacaaaaacaaaaacagatcatgtgataccttaaaaatcatgccctcgttgctaaaaagtcaggtttttgtgattctaacaacagctcagccccactgcaggttgtcttaagtacacttgctggtgtttggggtgggaagggcaggggcaggagcctgtgcctgtgatcacagaaaacatcaaactggcattttcttcccccagcttattcagaagttgacagatgttgcagaagagtgtcagaacaatcagttaaagaagctgaaggaaatctgcgagaagtaagcctccatcccttcacattcagcctgaatatacatgaatgcttcaagggctgcttgctattcaattggtctgatttttttcccccattgtaaattcagagagaagaaggaattaaagaagaaaatggataagaagaggcaagagaagataacagaagccaagtccaaagacaaaagccagatggaagagtgagtggaaagtagtcctccctaactggaaggaggagcaggtgctccctgtgagaggaccagtgagagaagcagtgtcttaaccaatggccccttcataaagtctctccttgaattactcttttatatgactcttgccttagtccctgttctcttcctgtgcagagacaccatgaccgaagcaactcagagaaaaggaagaatgtcactgtgggtttacttatggtttcatagggttagtctattatcaccaaggtgggagcatgaggtgctcaagttgctggcacagtagctgaaagctatatcctgattaaggggtggggcaaacatgggcttctgaaacctcaaagcctaccccagtgacaaccttcctccaatgagaccacacttcctaatcctaagttccactccctggttactaagcattcaaacttatgaactctagctggccactctcattcaaaccaccgcagtctcctttatggctttttcagtgagctctcaaacagtggcactctgggcctttgagaaagaaagtaaagtgagctctttggggaaatgactagatattctcttagacaaccttgggagcatctaataaaaacagggcctgtgcttggggagacacacggtcattgttaccccgaaacacacacacacacacacacacaggcttgacctttctttcaacagctatacaaagacagtaaaagcgtaggcatctagagttccaggtggattggtataatgatctgtggcttatttccatttagggagaagacagagatgatccgatcgtacatccaggaggtggttcagtacatcaagagggtatgtctgctcccacacacacacacacacctttgcaaatgccacacaaacagtagccaacctcactgtgaacttctaggaggagagtgttgcctcctagtacctagtcgccaccagcatccagctgttttgtgatactctataagggcgcacttattctggctgttgccaaccatattataaaaaagctaaataaaacgtctataaaaatctgtagggcagaatcactacctaagtcggggactcccccctaaaaaatgacacaaaagatggttcccaaaaaatcccttcaccgttaagattatgtccacatccagattagcccttaagcttctttaaatttgtgttatagaaattttcaaagattctcaaaaatgtatatccaccagtcaccaccccaccctgtactgtgttcccatcgctagattcaaaggccaattttggcccagaatgttcaataattgctaacatagatctgaaaaacctttgggtttgttgttgttgttgtttgattttgtttcttgtaacatgcatgaaagttgtatgttgttgttattgttttattttcataagtgactcttttcttttggtaactttcttacagttagaggaagcacaaagtaaaagacaagaaaaactcgtggagaaacacaatgagatccgccagcagatcctcgatgagaagcccaaggtaagagctgagaaattcaggatgtctagacacagttggctcatttgtcttccattcagtaaaagtaaaatcccctgggctttataagtacctcgcgcaacatctccagtctccccttgagtgcaaaactcaccatttagggtgaaagtaaaaatacagcaatattctgcaagtactgaccaccaacagtgtctgcggaaagatgagcgcgtacggtgccctcgccacacagttggttcggatacatggcttgggcaagggcatttttatttgaatcaaccaccttcatcttgtaatgctgtaataccagaatgtgcccagcagaggacactcttcaccaagatcaccctgatcttgacccaacaaagtcttccataaaaacaaccggggtgggggtgtgggtgggggtggggtggggtggggtggtgtccgtggcggagagagaaagaaaaaagaaaaaaagaaaagcaaatctctttgccttcatagcaacaactaatcagtactgtcctttaaaattatattacagctcggagtgtagctcagtggtactaagagttgtctgcatgtacaaggtcccgagtccaatccaaaacaacaaatcaaagtaggttggacttgtggcttgttgaaatcagttgtctatggacactgtgttgaaaaccctatctgtaaatcaaatactcgcaggttggccaaaagcatgtcagttctaggacattctagccattttgattcattgctgaatatttttctttctcttaaaacaaaatgggctctctaggactccctgccattttcactatagttgaaaaatacagattctcaaaagtactaccatttggcccgattgtttattgagtctgcaatactccaatgctaggtttatttatttgtatgtaacgttcctgggttggcttcagagagagtccttgtggcttgctctaggtatattttcacggttatttatgttctttagcctttatgcttgcaatatatgagccacttaatatttgtgattcctaaagatttcaggcttagcaggaatcgatggttattttgtatattgttaattcttaagtttctcctttacatatacaattcagatcttcttagccagcttcttggtccactagtgctaatataatgggatgcattttagtagaactttagaaattgccacacaatctccctttccttgaattgagttgcccacagtcactcatgacctaaaaatattatgtatagaattcacagagtcagcaatccatgaagtcctaaaatgtacaactttctaagcagctgatgaaccctggaagcaatatgttagccattctggccctgtgtacagcatggccacccagtggtcctctctgtcatagggtttgtgactcctttaacgtagtaatggctccaaaccacaagagtggtgacattaaggagtcttgaacctgagaacactcaagggcagattagctttggctttttgtggcttaaaggcgtattaggggaggggcactgtatttttcagaatcaatctcatttaagtactcaactattttaaatttgactctgattagactaaaatttaagaaaaatattaagtagtcagaaatatatatattcagacccatacagtttcgagttttgcatctggagttgagtttgtcaccactttgtattctggtgtaataaaatttatttatggtgaatctcatagccagttttaaacctctacaaacccttatttacaactaatactttcagttttgctttgctttttgattatgtgtgttcaacattgtaaatattttagccatagacaaaatgcaatacacatattttaaagttacacaatttactttaagtaattcatagatatcatatgtacgtttattcacacatgtgtgggtgcacatgtgtgtatgatgtggaggtcagtggataattccttaggtggtggccacatttattgtttgaggtagggactcacatgagcctgaaactttccaagtgaataggctccctggctagggacccaggatcctcttgtctttccctctgcagagctgggattatcagagtgtggcagcatacatatgtgtgtacattgtgaagattgaactcatgtcctcatgtttgcaaggcaagaattttactaactgagctccctatcccgtgtgtgtgtatgtgtgtgtgtgcgcgcgcacgcacacgtatgtgtttgtgcatgcatgtacatgcatgtaaactcaggttccttcaccctcagcgtccccatgctaggagtatagacatatactaccacatatgtgactgttctatgtcatcataaataaaatcaaattaagttagttccttttgaagcaccttagaacttcttcactctatacaaccaaacattaaactggctaataacttttggcaatttatctgccagagtacagttttacagaaaatcaatttcaacccgctgggcatgcttgaatacatatataatcccattaacttgggaaatgaaggctggaaaactgagagctcatggttcatctagcttatatagcgaggccacatttctagcaaactaaataaataattgtcttaaatagtgccaacttaacaaatgacattattactgtttgagtcatgtcataattctaggggtgggaggacggttccaggcatacagtagatgctgtattagttgtttttctgttgtgataaaacaccatgaccaaaggcaactcatagaaaggtttattttggtttaccattgcgaagagagagaaatgtgggagagagtatgtaatggcaagggagacagttgagcaggaaactgggtgagtatatctctacccacaggcaggaagcagggagaaaacagaaagtggggtgaagctatacaccctgaaagatcacctgcagtgatgtacctccacccgtaatgctccatgtcctaaaagttccataatccacctaaacagtgttacctgctgggatgaagtgttcacatccatgcacatagaggagacatttctcattcaaaccacatcaagtgggcagccagttctgaggatgggtggccatttctagggatagctcaccacttctagagatgggtgttcagtttcggagttgggtagctagtttagtgactcaacaatattattgagaatctgaatttttagaatttcattgttgttgcttattgtcctcaagctttaaagtcagtgagacatggctgccaagccccactgcattatcttctatctggtaccattcaaaaccagaatggaaaaaaatccccactttattcccttcataggagtgatggaaaccttccagaatggccagccaccaccccacatccacaaaatagatttgtctgctgtggtgctataatggagccacattctagttcctaaacaaatcccaagaaagaaagcataatattcatgactggcttagagtgcctaagactcattcacagaggtgggaggaagtcagcttcttgggtttacagtcaccagaaacgtaaacaaaattgatgctttctcattgaataaagagtgaataaatagtaattgggggtagtgagcagtttatactacaactgtatatttaacagcttttattctttctttcttgtgtccttagaaaggatctaaagtgttcctcagagttctaagtcattctcttgtctttatttcttagtctacctaagtactgtgataaatttgctccttcgtctgtgatgctgttcttatggccatcttgttgtaagcggatttgaaggaagcccttgaaaactgtttgtttggtgtcagcctaaatcatttgctgacgtgtgttctttggagcttaagggtgtgttttcagagctattgctttgataataaaattagaaagcacacgtgaagaagccagccatggtagctcacatctataatcccagcatttggcaggaggaagcaggaggatcaggagtttcataggtcatccttggctacttatcaggcgtaaagccgtttatataagaccctgtctccaacaaaacaaaacatatcacatgtggtaatattgtaagatatttagcaaatgaaaaaacattgttaacaaaagctttctgccactgtgacacaatatcagaaacaattaacttaaaaagagaaaaggttagttttggctcttaagctcatatgtgttagcctgctttgtttggccctattgcattggccctttcgtagcacaccaggtcacagagatagcacacggtgttcatgcttggcagccagaaatcagaaacaggaagaacagaccagagtccagttttattcaaggtcaacttctcactaagctcatttcttcccactggatgcactcaaaaataaataaataaattgagacaaggttattatgcagcttacaccaccttaacggtggttcttctgcctccacctcctcctttctgattaaaggtatgtaaggtgccatgcctagcaaggcctcactacttaaaggtttcttgaattccttataccacttgtgccgtagaccaagcgtttattcgtggacctctgggggatgcttcaggtctagacctgtaagtagcagcggagggaaatggcaagatcaagtgtgggatacgaagatagacactgaaacactggagagcaagtatagattaggaaaggctaggatgatggagtagacctcagtgtgcctctgactgtggatatagaccagaaaaagactagcactgcatttgaaatcatctctcttcaatatggtactggaagggccttggagcttgacattagatatgaccaaaattaatcagggcagcaacaaatataaagaggaaaatctcagggaaacaaaatccatctacagtagctatgaaacaggttcaccaagaatgatagatggcaaggcagactggttttatgacatctagaatttatgaactatcctgaatttttgacaaacaactggagctgactatatagctgtcatacttcataggaaaaaattcccaaatgtcatagttagctctggaatacagcattccttttctcaaaggggtggggggggcaggaaaaaattctaagtagaacctgatgatgcacaatcatttgcttatagcaaaaaaattccactatatagcatccctcctcttttttcagtgcaattcagcatattattgaatataataattcacccgccttcatctgcttcattctgtgcaataggcacacgctggcatccacactcatggtcctaacaaggaggaagttctttttagaacactcttactctagacttatctgcatgcctttcttccttgtagataaacaaattcttatctgttaaaagtaaaaggagattttaaaaatttaacatagaaccttcataggaccaagagcctctcctcccattgatgactgcctagaccatcctctggaagcaggagtgggtgggttggtgagcagggggagagggagaagatagggagtttttggaggggaaaccaggaaaggggataacatttgaaatgtaaataaagaaaatatcaaattaaaaaaaaaagaaaaaaaagtttaacgtaagaaagaaattcgaaccaccagttggtgaaagccacagtacttcagtggcaatacattttactggcccaatagggaacaaggtgccttaaatggttcatataaaatagagctttgtggggccttcactcagcagcaaactcaggttccagatgaagccccgagtcccccttgttcttactaacctgtaataaaacattcaaaggagaacatggcttatcaggaccagcatcttcagtctttggtccctctttgatggaaagcagatgatggccccagtgtgtaagcctaatttggactgcccccacattgcaacaggtagcagaaccttgtgataggtggaattcgttctttgtctccattctaaatgagcacacagtgtctgctctcttggcatgtaacttctgagagcatcacaaataaataaataaaatagaggtgtgtgattctcacaggcaatttacacaagaaataaatattttgacccttgatttgacatgagatcaagttgcccgttgtgagtctcactgagacttattaagttaaaaataatagacattcttgatagacattcagttccttttcaacagaattctcagttccagagaaatattcagatacgtgtttcctggcagtcaactgtttgactgagcctttaaatgtatgtcttcaattgtgtctaagatacatgtttttgcaaacttcaaccacagaatctggaagatgcttgcaagaacactgtccaggcttccaactcggtggcataattggtttcctcaggatttctatacctgagtttgccaggccaataagaaagaattactgtatatgaaacatgttggacgttattcaaaagctcagctgccaatagagagcagccacggccaggtgggcttgaacaaccacaagttatgatggtacagaggactttctgctctttccccggaacatttgaaagaggattactttagcatgttgcccttaatctgttgcaaatatcccaatgtatattgatcactctgcagctaatggctcttgttacaggaattgtcttttgacaggactttttaatgaactgtctgcctgcctcgaaataaaaaccagtcggtaaatttgtaattttttttttttttagtctgacacttaatttatctttggtgtttcttaggccataggctttctgttttaattttgctcatcatcaagagaggattccaggaagccttagggcattttcgtttatttctgaaaaacatttaatcatgtagctacctcgccctcccttcctaccctgcccctcctcttttctcaacaggagggatatagagtagttttccttatttctcctctgacatctctgtgacaggtgagtgactcatctctggtatgaagtcaatcatgctagaagcagctgctgctctttgagatgtacgtgtgggggcagctgacatttgccctcacatggagaggcttaacttgaggatttaaagttagacctttctttaactaattcatttgtccctcctctaatctttgctatttggtggacaagaatagattttcctgccagtatcaattcaaacttctcataggagaactcaaactcccgagtgagagccaacagcctttggcctatgttacactcgtcaaattaacgcacatagtaggttggttttatctgttctatatgaggttgttttcctttttttttttacctatgtaaagaattgtcttagaaggaaaatatggttattctttcatttcttgaccataaaactgagacatgttgctttccttcggggagataccagggaatttgggaccattttcgtttctctttgtccaatctcaacttatttttgagacctgtggtggttgtggagactttttaaacttagaacaaattttttataaaagagcttcaaaaatctctggccaatactctaaaatacaataaaactacatgaggagaggttccttcagtgcctctaatgaagtatctttctaattttacactatgtcccttggttttagatgtccttactgaagacattgaaaaaggtaatgtcgtgtgatccccataaggactttttaactcctaagacaggcaagagactaacgcactctgtgtcattggcattcattcagtttattcacacagtcgaatgcagccttcctttctgaacattaaacataaaatctgaacaaaggtgctagagagatgactcagcagttaagagcactaactgctcttccacaagtcttgagttcaattcccagcaaccatctgatggctcactccatctataatgggatctgatattgtcttctggcatgtctcaagaaagctacagcgaactcatataaaaaaatcatgcaatcaatcaaccaatcttgaaaatgtggacaaaaatccacatcgtcttccctctgtgatgacaccttctctggatatagaatattatgttggcagttactttctggtaatacattggggataaaattctgccgccttcctgcatcagttagtgtagttctttagacataatttatatttcttccctttgacctcatttatagtttttgggtttctttttgtatcttatacactgtttctataatgtatctatgtgtttaacatggccagacagataactctataatgtatctgtgtgtttaaaatggccagacagataattctaatgtatttgggtaactgaaatggcctgaaagataactctgtaatgtatctgcgatttgaaatggccagacagataactctaatggttctgtgtttgaaatggccagagagataactgtttaatgtgtctgtgtgtttgaagtagccagacaaataactctataatgtgtctgtgtgtttgaagtggccagacagataactctaaaatgtatctgtgtgtttaaaatgagcagacagacaaccctaaaatgtatctgtgtgtttgcaatggtcaggcagataacttcatctcttctgccagaactctcagccgccagggtagcaaacaatgggtcctactttccaatgtatttcttaacttccgggattttactctgtgtgcaagtgtgtatgtgtgtgtgtgtacacctgtgtattacacatgcctgcatgtgttataaatgtgtgcattctcaggccaaatacactcttactctacttttttcccttaactttagggttttttgtttccctccttttgttctgtgcttccttgtagatagtattttttttttcttctcactctctgtctaatgcattgactctaccctactcactcactcaggtttaaatctttgcttgctttctatctttttttttctggattttcccttcctagaaacaaggtgacgtgggaatatgcagtcagttatactggacagaaggcagaggctccagaaggaatacactctagctgctaagtagatggtcttgagttagggttctaagtctgctcggtaaacaccagtttagcattgagagcttactgatggcttccttgttcccactgtcatacgcacaaacaaaacccccgtatactcagggatgggagcttggggatttctctccgtttcctgtcctgcgtccatgacatggtacatgatttgcctgcattttcctactactaactggatcttaaattctcactacatgtctaactttcaaatccttctttgtgctaaaagagacaattaacgatatcaatacacacattataaacatctttaaagcaaaatatataaaggtataattgataatctgaaaaccattgtattattttactcaagcctttggcctttgaaggggaatatggtgagattcaaatcaagaaagacatataactatttatccaaagacagtagagcttaagtcttcaagtccttggtaaatcaaatatgggggctgaaaggttttcctaaaagtgccagtatatggctctgtgctgagaaaactgcagaaacttctgttctacacaggaaagcagcagctaacactaagctactttctctatctcttgggttatatctcaaaagcattggcatagccagtcaaccatgggagtcctattcatacaccttatgtaagcaaaaatcagttgacacaagtcgtctgtgtttcttatcattagttgaatctcagaatctggcaaggaagttttggaatttctaactgaaagggtcaaactgcatttcacttaaccactctttgatttagatggaatcagagacccctaggatttgctgggagcataatgtattaagacatcaagtaaaagttcagtctgcttgccttggctaaaggcagcacagccatgtcgcttggattttaaaatggtttctctagagctgtgcaaaaggacatagcctagtcctatcttggcagcaaaagtcgatcattaaatagagtcacttctttgtccaaggcctttttgatggcctctgtctctcttacagtagaggttcacgagatccagccctttcattctggaccctttctttctgtctgcatggatctaccattgcttaggctatactgaccttttcgctgcacccccaaccaacagcctatcccacccttggctcctgtacagattgtttcctcataccccaagtgtttaatgaacaactccttctgtatttcaagtctctgtcaaatcactgatcttgaggaggctttgagtgatcactctgtttacatttgagcctgccaggattggagagattgttaagaacatttgttgcttttccagaggacccaagtttaaatctcatcagccacatggcagcccacagctgtctgtaaccccagttccagggaacccagcacactcttctagcctctgtagttaatgggcacaaacatggcatccaggcatacactgaggtaaaaacatccaaacacatgaagatgaaaaaaatctgaaatttgtatgccacaatgacttccatttctggcctttttttcctttatatttttctgtgcttcactgtatggaagcactcctccttcagtcatagacttccttctgaagtctgattgtctttccccagtaggggacaagctgcaaggggacaagatcttcttccattttctctgtgtttcctgatgtctaagcactctaaatacccaagaacaatgcctgccacattcttcctattcagtaaatatttgaaagtaattgtttaatatagaacatttcattaatttgcatgccaatttattcatgggctgtcataatctcaacatggcttctgtaaccacatagatgctactgaagggagttccagtaatgatttttgactcttttnnnnnnnnnnnnnnnnnnnnttccagtaatgatttttgactcttttgttgttgttattgtttacatagagagatatttaaattaactacctttaaaaacattctctctttgcaaatgaaaaatggagtattaaaacaactcgttgggtcaactcatcccaaaaaaaagctgtcaacaatatcatcttttctcaggactcttgatatggtgggatatgtaccattgtcttcacattcagtatctaatccctggagaggatggggaaaagccaagaagtcaatgagcagaaccactgtggttttggcaggctgggtcccatgctacccttgccagtgctgagggaggagagggtgttaaactgctactccaagatggcacagcaagggaccacccagacctaagtctgaaacaccaggtgattcagaaagccatttccttgacagagaaatgacagcctccctttttctccacacagggggaaggcccctcctcagtcttgtcggaaggttgccatgaggatccctctgttccccccaactttactccccccaaccctcaagctctcaagtggtgagcaccgtccttctagccaggtaggactggatgggagggcccttttgagagaagggtggttgtgtggccatgccctgctcagtcttcctggacttgcctgtttagtcctcaccctccctcctccacagtccctcctgtttcctggggagtttccagcacatctggaatgcctcccttggctgttcctgtacccctctggtattgctctttctatctttgcattctttccaaccaacataaactcccattctttcctcctctttcttccgtttccttctgtttacgaaattagcttccctttttaaacttgctttgttttctttcttgctcttcatctctttttcccaatctgaaagtgtattttccagtgattcccactaaccccctttatccacacagcccacaccccaagagcacaagagcagtctcccagggaatcttaacacattctactctgcaccatagttattccttgtaaaaattctacaaagttaattttttttaatcgggtggcatttggagttaagagggcagcgcatagccctgagttcgtagaagcaagagcactagatcgcacccatgcagcagggatgctgggtcagcagcaagaggctgaggcaaactgcaggtgtgaactttgaacagaggactttagcttgccgttgtgttgtaaaaatctattgtatttttaaacttatctgaaaacaggtctgtgccattccaggtgtggatttgggaggagacatgagacgtccttgtaattaaaaaaaaaaaaaaagttaaacttcttaacagcacagtagccttgttaatcctgaacaacaatatttaattgtatatgcaaagtaattagtaaaaaggattttgaatacacacacacaccatgatatgtttgaagtaatgagtacaccaatcattttgaccttatgcacatgtgccatgtgtctgttctgaaatattgtactataatccatagaaatactgtaattgggacttgataaattaagaaacatttaaaatatttaaataacctttttttaacagcaagatttttttcagtgctgattaaatcttagtgggctggtgaattacttgggcatgctgttgagcatatatcttgatccaagaggtctagttgggtagatgaatctgcctttctaaccaggtggccctcattttctgtgaccgtgatgtgactgccacagttctagaacatgcctacattctgtcttaagcctacagaagaagctgtaagctgcctctaaacttgaattttgtttttatctaatcatgagcttgcccctttgatatcattattttctcttggtgagtggtagggaaggagagagggaaggagaaagagacagacagacagacagacacagagacagagatgacagtcagacagagagacacacagagagagacagagtgcatttgagggcaaagttagaacttggttctgattctgactgcaccgtctcattagtgattgtactgacctgacccagcgatagagctcattcctgggaaagagaaaatctggcttacacaggtttccatcttgtacaggcaatccccaaggggaatttagaaacccttcctcatttagatctaaatgttaaggcttctttcttgtgggttttttttgctgattattggtttctttcttttcacgaaaagagggtaccacagccttgtgtggaggtcaaaggactgttggcaggagttggtcctttccttctactctgcgagtcccagggatgaaactcaggtctgctatggcagccagtgtctttagcagctgagacatctcactggctttatattgagagccattgtgagacagtttatgtgatgggtagaactctggattctctcaaaagttacaaatgacggtgatcctaaaaatgcacgacttgagctttattttcaaagcaaatgcatagggactatgcatgctatgctctgccctagtattccgttcggctttggatggcctcatttacaactccattcccttcaggataacaactgaccttccaggctggcacacagcaacaaaacgcccaaccaaacaaacagagaggcaaaatgatttatctgttaaaagattattcccataatacctggacttcccaaaaaatctttaatcacattgttagtttgctccctttagctgcgcagagacaaagggtgatgtaaaaataaaccaaccccacactgctcatgaaaaataggtctcactgctaaaccagaaaaaaaaaccaattatagtattttatagtttaaaaaaagacaaattgttcttacataacagtatataaaaagtcatttttgttccaattttaattttcccaaaatgttttttatatttttcactaaacatttctatttccatataccacctataaaatgagcaaattaattaaagctagaagtacacacagcttgtgatattaagaaggtggtgcccaggagtacttgtgtgcaataggtgatgttcatgtttttaaaattgtgagtgcacaccttcatcattgatgagaaagtacactgcgagttattagctggagatcaataggtagagctgaacagatagaccgggctttgagtggtccttataatgtctctttttaatagtgaaagataactgttgggcaaacttctaagtaaagtgcttgttccttttgtgtggacgtaaatcattagataagaagcctagggggaggaggaactggagagatggctcagcagttaggaaagctcactgctcttcttacagaggacccatgttcagctcctagcatccatgatgtcgaatagctcacaaacgccttgaactctacctccaaaggatctgacatattcttctggactccaatggcacagcgctcacatataatcataattaacataattagaataaaaggaaccttttcaaaagttaaggatctattgaaagtcccattccctaaaaaatactgaagatattgccttggggaaattcatgttaatgacaagtatttattaagtgtcagctatgctctagacattgccagcagggaccaccaaagaatagaacacacagctcctctatgatgtggtatattaaaagtcagctacctacaataaaatgtattaggttttatcctaataatagcatttatccagtgtgcactgttatcaagacgttccgaccatgtcacttgtggtgtcttcttgttctctgtggggtacacttgaggaacctgaggtatgagagagtcagtgaacatcctcaccactcttcctgcctttactcacctttaacatatgtgtgtagttactgacttcaaaccagagactaaatggatttggctcccttggcatctcactctctccttggtaaaatctgctgcatccccagtactctataaacatccttgataattaagctttcttctgaagtatcctagaaaggtgctagtacatactaggaactagtgtgtatatggggctggtgtgtactaggagctaatgtgtacaaggggctagtgtgtatgaaggaatagtgtgtaggatttgctatgggcctagttttatttgttaagctattggctttcatatatcctttgaggttacatttattataccctagtttcccacccaccctcaccctcccacctccatggacaccagaaaagctaaaggccatcttgaaagagaatcatctcctagattgtattaaagtgtcactcacacagcaggaatgggcttctctggagtgtatgacctctcaccctgcttgttttcactgacaacagaggcaatgcaagtgctttgggttacatttagaaagatttaagcaagaaacaaaggagtttctctgagagtaaggacgtctaaacacttaaagggaccactaagggctgcagtgtgtgtctttgaagatctttaaatgtggaaacaaagaatcttttttaccaacagaaagttctggaacctttctgtgatctcctttgagtccatgaaggatatgattaattaaagtcagacgtttacctctaaaataataggcatgagattcagagaattgaaggtgttggaggactcattaaacagctgcataaatatcatgctgaaagatttaatgagtccatagggtcactgatagagcaatggagcctcgatggcctagaaaaataaattagaatcgatagcgctcctctaagctaaccactgagagatggagtctataattatatcttaatgatgcacattggtgttctcatcctggagaaaatgaaaatagtttgttttcagttttgtacccatcgataataaaaagtccggtgtctttgcttagttctctggcctgtgggaattatgattcctttacaaagctatagttgggtgaacagtgtctattgtttaccttcattaattcagctaaaaggtgcctattacatagcaggctttaaattttcaactgggaaaagaaaatggtacctgttttcatcattatcaacctatattttaacatttaggatctgtatggtggttataacagtattttcttctatcccttgttcaaaatcatctatttgattgtttaaagttggacattgtacaagaacttataccatgagaaataccacgctctatgaataggacactttttctttctagaaaagccccttgtcaaacacatgccagtacaccactggcttgaactctatggtttcctgacacagggttttcctagaatttatacagagttcccactggagcttgccactgtagaaagatgattatccctcttgtaatctacttctgttgttcataacacaatacaatggctacctgtgctggtaagagatttattgcagctcatggttctgatctgagatccagaggctacatcagatgatgactttcttgctggcagaattccaaggtggcaaagggcatcccatggtgagtgactaagaacaggcttttatagcaaccctgctttgtttccttaagataactcattaatctcctagtcacatgcgtgcattaagccattcattaaggcagaaccctaatctcctattaaatgtctcaccttattctgcttcttaacatctcagagtagagattagatctccatgggtttcaaagcaaacaaatcacgttcaaatcatagtacccattcattataaaccaaacaagatttcctatggaatcatagtacttttcacacgcatttcatcctgcaacagcgagaggttatagtatcttttgaaacagtcatctcccaggtaaccggaaggtattattttggagaaaacaagagtttcctaaaacagaagttcagtcttcacaccagttctgtaacgcagtcagcaacatgtctgtataaaaattgcctcagccatcatgttagcaatcttcccattgccgagactcaactcgctggtgtctgatgccaagccaacactttcccagctcattttatagaatgtgctgtttctggttcaatcttctaaaagtcttaataaagaggtggtaagtgaagctgaatagaacttgggggaagaagtagtttggagaagcgtatttctccaatctcacccctctacatcatcttctaccaagtctaaagatgttcagacttggaaaaatgagtttacatttagaagagttcatcttcaacctctatccaaagctaaggctaagtcgcatttgtgaactctaaaatgtgaagaactggaagttaaaatgaccccttccaagttctttgggaacaattggcagcactagctgacccatcctggccctgctcttgagaataactctgcaatgtatgtgttttctgagtagagccctatttatgatttctgctgtcactataacacttcttatggtacttacaggtggacggtttcaagccaaaatgattaaataatttacattttgtatcctttctccaagtgagatttgtatgcctataacactggtaggaaaaggggagactggggatcccaaatctacccacatttatatgaggggacacatagaaaccttggtgtattttgaaaaaagagaacattaaaaatttggcaaaaagaaaaaaaagaaatagaaaggaaaaacataacggagggtctagactatggggggtggggaacaagagtaaaatcaaacatcagcatgaagagaactgcccactgtgtctaaagctcctctgacactatgctttctgctgctgtaacatgctcttccagaatggctcattgatgcagaacagagttttgcagctgacacttctggaggctcagaattcccagaatgcaccgttagcttctactgagcatccacccagcctgtcttggtggactacactgtagcaaagtctttacatagcaagatggaagaagttgccagacaggtatcttgtttaacaaagccacccctgtcacaacctactgatccatctatctgtcacttctcaagtatcccacttctgacactgggaccaaatttcctgctctgaaaatgtgattgatttactcaaactatagccaaagatgactgttccttggctttggtagcctgaacgttgtcagtagcttcattgattttgagcaactggtagaaagtagaaatggattctagatgacacactggaaggatcaggaggaggtgggaggcaatgaataacaactcatttaatatgcttctcaaagtttagactgaaggaaattgagttctacaagaaaaatgggtgaacagaataagtatacccagaggccgagaagctagtaagtccttgtagtttatagttgagtgaggtttgacacgaggaaataaaggagatggtaaccaaagaaaagaccaaggaagatgctttcatctaccttcatggtatttaggagagcttttctctccatggacattatcttactgagtatataggcaggactttaataaaatataatttcaactacccctgaagacaccacctcaatgctaggttgtttttgtttacagtttggtgccttctaatgatagtatttacaacatgatctcctacaccataaagctccatgcctgcctggctgctctactgagacatctaccacccaatagggggctaatgttagtttcagtagttagaatccatttcacctcatagtggagggaagcattctgtatatgataaatcattttttcccactctaagctgtagctttatatctgaggaggagtttttcaagggaaggatgaggctcctaaaagagaaggttctcggtgatgagatctacacatcctgaaaaatgggattgcaggagatttctcagagttctttcagaaaattccaacccagaagccagcttcagaggtcacagtcttaccatttctgcaaagacagtcgtgccagggacaatgaatagagaatgaggagagcccagatcttccaactgtagacttggatataaaaggaaatgggggagagaatagagtagcaggtaaggttttgtgtatgcctctctgggccacaaactggaaaaagtcttgactggtccacatcctgtgtgtctcaggagggcagggaagtattgtatgtcccagtaataggaagtgacatgttacctgaagccaagcaacaagcaaaaaaggattcatatgatgatggcttggtggctcatgttagttctataagaccatggactcacacagtgagttctacaaggcttttctgatgtcaggacatgagcaacccagtagtgaggtgctggtccttcagatgacatagaaggaaggtttgcaggtcagaggctgcagccctgctcttcctaaagatacacggagttctgtaacagacttttcctccatgttgagaaggaaagaaatgggagggacaccttttaactcagagacttacccacacaagacatggggcaaccaattttgtaagggagcagaatttcagagcaacgaaggaaatggtctgtttcctctattaattggaaagggaatggttgcctccgttccttcgctggacctgtggccctcacatcttcagtgaccatgtttagggatatatctgctgtgactgaaatcacagccatgtcacagacaggcagttcaagggctgtgctaggttccgtgagttacttgagtcaactgaaagagaatcggtcacctgggagatttctaacctaatttcagactttctggacaccatgtcctctcatgacccaacacctgctgtgacagatagacgtttataaggaggcaaataacaaagcttcatgaacgcctgggtctcttgggaacaagaggcgtatgacttaggtgacaccggcatttccttgatttctttttcagttttctctactgtgtttatacattcatagaaaggtttggcagtattttaagaaaaaccttttaaaatctcctattttgtagaaaaagcattctgattttcattgctgaaagacttgagtctacagagtaaaagtcagaattttcttccttcgagttttgtggtgctcaagattgaacacagttcctcaagcaagctaggcaaacgctgcatctatgacacacacacaccccaaatacatagttaaaaacagtttcctccttaaaactcagaatatcttaataaaatctgctctaacagaaaatattgcacacacaaaatccaactcactcatgggaccagaaggaaacattaggaggtggttaatatgccttagaaagtaataaataaaatatttctaatagaaaaagtggactgacttttgacatataactttgtggtcttattccagtagatgtctgctactgccagaaagatggtgacacctaatgtctgccctgccagggcccagtcatagcaaggcttttgcatgtgacccatgcacactccctcttctctggcttaagctcagctggaagttcaagatctgtactatttcttttgaattttgtacctaaatgttcagagctcaccctacaacaccctacaacatgtctaaaatctgtaagcagtatttaaatcttattggtggaattaaaacacgacaaaagctgctgcatgagatgttctgagagcccaggatgaacaataatgggtggtgtcctcagctgtgttacattttggtccatgtctggatgctggcctttggggacattctgcataagcattaaagctaacagaattgtaaatcccaaaggctacactttaaaactctcaacacctagatatctaatcttgtaaataaaatccttacttatggatgagtaaaagagactgggtttcttttttcttatcacttgtaacgaccaagcagttaatttaaaagaagcacccatatccaacagtccatctatcaacgcatatacaagatacacttgagtatgtattgacacctcagtatccatgagaatttgcttgcagggccaccacaggtaccaaaatatatggatgctcatgtttcctatatacagtggcatggtgttagcttagagttgcacattgcttccaactcacttttaattcctaatacaaggtgaatgctgtgatgatggatgttattgttatttaaagatcattggcatgaacagacatttatacgttgccactgcaaatccaatttttttccaaacatttctgatccatgattctatgattggctgaattcataaatacagatcccatgagtagagaaggctgtctcatgtgtgtgtgtgtgtgtgtgtgtgtgtgtgtgtgtgtgtgtgtgtgtgtgtatgagagtggtgtagtggggtggctgtatagacataaaggtacaacagctcattgcattggcatgaactctgatgaaacatctctttcaatacttagaacatccaatcaagaaaatcgcattgcccttagtgtatgctctctttgaatgctgtacaatatgtgatactttctacacttgtcagtctgtctagatgtagcaaacagatgaccaactgggcctttctgcctagctgcccccatacttgctattcaagtacaaagcctggtattttaaaactccagtctcttttcttttcagtcaacctttgcatccctttacacaggggttagataaaaggatgctgtctgcagccagcgttgtttgtttccatggttctttaccgtgccctcttttattcattttttaatggctacggctgcaggtttatcttcacagagagggaaggcagcttgttaactccatacgcaattgtgtgcccctgagggctgtgctttcctgtccgcctgtgtgcaggggtggcctttcctcagcttcaccctctcttccttaatagagactttccccactgggcttctgttcatatctggcatttaaatcattgctgtgctcttattgacataaaggtatgctgaagggctggggtaattttaatttatattcattgaaaggggaaataaaggaggtattgctaggcctgcaatcctaagataggactctgacctaagcaagctgatatgttgatttaccagaaatagaaagaagccagagcaatgctctcatggggtggtgaggccaggctcaagcctgcagtgtagcttccagacttcttgtctggactgcaaccccactcccaaccatcctcttttcccacatacatccctcttgtgagttacagtatacagcatggagattagatatagaaatatttgacaatttaaaatttatttgttcatcataaaacactgaatatataaaatataaaggaattcagttactaccatatatatacgtgtgtgtgtgtatgtatatgtatatgtatatgtatatgtatatgtatatgtatatgtatatgtatatgtatatgtatatgtatatgtttggtatactataaaacacataagccgggcggtggtggcgcacacctttaaccccagcattcgggaggcagaagcaggcagatttctgattttgaggacagcctggtctacaaagcgagttccaggacagccagggctatacagagaaaccctgtcttgaaaacaaacaaacaaacaaaacccataaaatatagaatcatattatacaactgatatagagattctttaggaatcttgtttctttctataggatagttgagaagtgatacttaatgattctcctaaaatgatagtgagagacagaagagtcagaggaaaacgaagagcagacagctatatacaggagatcactaaataattagaatacaagcaagtggataggaggtaacatggcagtatgtagctacatgtccagggccaggagcttagggggaaggttgtccaaagaagaccaaaggatacaaatatcattgagttacaatagaaaatgtttctgcaaaggcatagattaattatcaagacatccaacatgtgtactcaagaacagcagcagcaaaaatgcatccacataaaagccccaaaccagaatctacagtatctaaagcacgagacaattgccaaacattttcagtaagaaaactgtaggtgacagattgaaagctagcgtggggtcagcttctctacagataatacggacatgtgaagagcaaagccatgtcttcacaattctgaaggggctgactggagagttctgtggccaggcaggcagaagagttgattgaaaacatgtccagacacatggaaataccatgcaacctacaaatgaaactgaaatgtaagacaaaggatgcttgagagtggatgtgtaggcacaggtaagcatgtgaataaatacagaagtcataggtgtttatttaccaacttaaaacatggttaacattggaaggacgctgagattggatagggtgtcctggatacaatacagctctttatatgtattatttgtcgtcttgtttttccaaaaatagcatattcattcattttctgtgtggtttaaaatactcttaatttactgtaaagaatctattactagtaaaagtttcttttaagtgggagcttgttggacccttaactttcctccggctgtccatctgcatccacttctaagggccttctttctatgtctagcttttcaaacctccaattcagcctaagagatgccattatggttccttgatgccatcctgtttctgcaaatgagctcttcaagcctgattggttcttagtagactcggtgatcctgaagtactcctgaagtcacgtgtttctctcagcatggcattccacatctgtggctgatctaactgtaggttctgaacaaacttcggtatatttttcttcatacaaaaattataactacctgaatgttagtgaaagttaaatttgtatggtgattaaatcaccacttcaggaaatgatttaagttatgaaaacatctagaaagagaaacagagacagttaaaacttaggctacattaaatgtgtctgaagacatcagcagacagaaagaagcaacggctgtccagaggaggtgtttctgagtggaagcagtgcccaaaagcagggaagagtgagctggcttccccctcgagggtatctgctgaggtgtttggacagtggaagaaaagggaagtcagccaacatatgaagtgtctcataaaaaaaaaaaaaaaacacacttcctaaaactgggacactggggagccacaaaggctctgaccatgcatcaatttaaaataaaagaagaaaactgttactatgtagaatttcaagaaaattgtattttcaaggcatgatgtactataaagagaaaatgattttttggtttgtctgcttgcttgcttgcttgcttgcttgcttgcttgcttgcttgcttgcttgcttgcttgcttttccctgagaggccatgctgcttctcatagaaactggaaacctgaattcataccacttcgaggacccagtatttggtctatgtgtatctcatttaggactgctggaataatccttctataaaggaatcagcctttaagccataccttagacattattgcacatatataaacttcccagacaaatcatctcaccaaagtgaccacagtccatgcagcgacagtccccgagaaagaagcacaggagcacctgaggacagacagagtgctacagatagagatctgggaattctgagagacactagagcaggtgtgtggaagattgataatgtgagtcaggaacttaaatgaggttgaagctgacttgaaacaaattgactttccataaatgcagaacgcagttctacataaaatccaaggcatagctatagtcacagatggctaattaataaaattaccataatgtagaagagtgtcaaagacatgtagaaatacagtagagatactaggggttataacagactcaatgagaggaggtaagagagtaaaagaagaggctccgaatgctttgtccttcgaatcaatggaggacacaaactcatagaatcagaatcataaacaagatgcagtttttaaaaaatttctatatccagtgcaaacttactgaaatttcagaaacccaaaatatcacttaaggacagaaaacaatgaggatgttttaagcctagtccagacaaaacaaaacaaaacaaaacaaaacaaaacaaaacaaaacaaaacaaaacaaagaaacaaacgaaaataacccaccaggatatgcaccatggtaacaatggtgaatctcagctccctcaccagcagatgataaggaaagcagtcagaggaaaaacaaccacagagcagaagactgaagagcaacacccgcgagataaattagcaaataaatctaaacaaacatgtctgtgtaagaaaataatgatgcattgtgtggttatattatagaaataaaatgtgaagccacgcttcattctaaagaagttgatgttaaaacatgagtccctgtgttgttcaggaagagtgtgaagacattaattgggctgtaggatagtggatattggaacttctgctgaaagaataaaaaaatggttgtagcatcataaacggcagagcagaaaaatctaagattaaaaaacacagggcaacagaaagcagccgagaaaggaaggaataagcagagaaggaaaggaaaggatgaaaacatgaagtgaggtgatgaattcagaccccattacattagcaattacaacatatacacaagagtccactcatgtatattaaagaccgtcagcttgaagttaaaaaacttcagtgctacactgcttgaaaaggacttgttgagagtctgatggttcaggtgggttatacatcaaaagtaaagaaaactatgtcagacaaaacatagctaactggaaaatggattttaggctaaaataaatgaaggctgctacagaatggcaaacatccaattgtccaggaggatataagaatagaagcatcgtgtgtgtgtccactgtgttctctcaaaagatgtgtgtcaccaagctcagcactgtacatctagctctgtgtttaaaatgttcaacactcttctctcagtgcataacacatgaagcaaactggaaaaaaaccgagatattatgagaggaatttagtgattgcacacaacttgacattttacgtgtgtgtgtgtgtgtgtgtgtgtgtatgtgtgtgtgtgtgtgtgtgtggcatcatgattaccattcctattaggcctaaatgtctctactatcctatctacgcagtatgccattgagatttttgttgaagaaagactgactttataaatgatgtgtgtctgttcaaaacgttcacagataagttactttaataagcatatagagggtagcctggctgtcaaaggggatacaaacatcaactgcattttcataaataaacaacaagcagctagcataactcttaatttttataaatgccttagcaaatgtcctacatgtggcaataatgctagcagcaaatactgaaaattatgaacgaaatctaacagaagtagcaaacatcaaacaagcctgattataacactcttatgtgtgccaagagccaacagcataaaaagaatttgtcctagttgatctatagatgaagtacgatgccaagaaaattatctcaacacttgtagaatgtgctaagtagattcccaaatgtgtgtgagaaagcagagatctaagagttaggcagtaataaactttaaggtaactttaagctttaaaatgttatcacttatgaaaatcatcaatgtggaaccttaaagatactgatgggttcttggcacattaaacactggcaccaaaatgttacacaaaaagaactacacccactgtgaaactctctttgacagagttgacactggacatcagcagagaatggactttttaatccatggtgccaggactgtgggtcatcaatattaagaaaatgtaaatggatatatgcccaacacaacatgagaaaatccacacctacatggttttcaatgcttaagtgtgaagcataaagcagttaaatctttagaagataatgttcactactttgtgccgtgtggacaagggagtatttccttactgatacagaaaaaaaaaaaaaaaaaaaaaaacaaactcaaaacttatacaactattgacaatatatctaagcaaaagtggatatgtgtactgctcatacaaatatactttgaagggcagataattgttatgcataggccatactaattagtatatattataatatatactatgcattatactaatatatctagcaatagtatagatgaaattcttgtaaatttagagataatagaaaaacatacaaaaactaaacacagtatttcttatgtggaaagtcacaaatatctgtgtcctttcagattttggcatccaaagaaaatgttagacaaagcaaatccgagtggagatgactttagtttgattttaaaatgctattccgggagccagcactatcctgaggtctgtgcttggtagatcaacactttgacacatggtctctttctagagatatatttgtatccatctgacattgttgtatgtagccagatggcaaaggacaggtcagagtcattcagcacaacatgtgacctatttacaggcccaacagcctgtggtttaatacttaaagtaatctgcacctgggttttctttttaaacgtgaatttctattggttgtattacatggcatggataatctgatcgttggatacagtgtcaactagcaagataataagatgctaattctattcagcaagtgagtggtggatattgtggtggtttgaatattcctggctcagggagtggcactataggagccctgttggtgtagatgtgttcttgttggaggaaatgtatcactgtcaggataggctttgagaccctcctcctagctgcctggaagacacagtcttctgtttgcctttggaacaaggcaaacagcatctcagcatctccagtgtcatgcctgcctggatgctgccattttcttgccttgatgataatggactgaaccactgaacctgtgagccagccccaattcaatgttatcccttataagagatgccttggtcatggtgtctcttaacagcaatgaaagcctaagatggatgtcattgtcaacccagtgagatgctgacaaagccactgacagccagcaatgcacacttaaacactgatagagcatgctgctgacattgctaattctctactgagcaagctaaaacagtattagctcattctatatgattggttggtaaactactttatttcaggtgcatggggggaggacaaagagatatggtcctttatggagattagatggaacagacacaaatgaaagaaagcagggaaaggagtcgaagctccttctgctgcttgagagactctacatttagcagaactgtgttccaaccataaaacaagagaaactctaggccatctgggggcagagagcaggtacagccactgtgcagctcatggggaagagggcaggtttggagatgcccaccaaagaagttgataagcttcatgccttctgtggaactcagggggaattcaagcaagatagcatgttgctctttctctgtacagttataatgaatcatttccacatagtgaaaaatgctaaagagggtgacaaagaaatgttctatctgcagatggcccttgcagtatattatcacattgtgcctactgttgtctgcttgaaagaaagaaagaaagaaagaaagaaagaaagaaagaaagagagaaagaaagagagaaagaaagaaagaaagaaagaaagaaagaaagaaagaaagaaaagaaaagaaaaaaagaaaaaattcttgactcttaaatgtcaagtagatgcaaagaaaataaaatattctgagatctaaaggaggatgtggtagtaataaacacaccaatcaatttgtaatatcctgtttcttttcctggctccccagacactgacaaaaacctcaggatagtacctgcttccagaatactttcaaaatcaaaccaaaaacatcacagcatgggtttaaatgatggctctaatgttttgtctagtattttgtttggatgcccaattttgattagacccaggctctgcttcattattaaatattttactgccttctcacaaattccggagaagtgtggttatgtgatgtggacatggaagagtgtatgagagaaaccacatgtaatcttgaggatatgtgtgtgtgtgtgtgtgtgtgtgtgtgtgtgtgtgtgtgtgtagatagattagatagatagatagatagatagatagatagatagatagatagatagatagatagatagatggatggatggatgaatagatagatagacacacaaggaggcatgtgcccagttgggcactgattgtcatacagccatcaaaattgtttttcaatactgagaatggcttccctaacatgcacaagatactgagttcggtccttaccactataaataaatatgtaaatacatagataaacaatagaaataaggattggagctccaaattacaaatatttatttcatgacagttttgtccccaagaagaatacagagagcactaatacacacagcaaagagagatgagcatctcaaaggacagatggacagtgtgagataaagtgagatcaaggaaccaagtaaggcagtcagttgggaaccgtgagtaccgaagtcagttgggaacagggagtttgccactcaaaacctgtgcattatttttcagtgtgagcagaagctgcctggcaactgactgagcttttaggtgtcattggcattgtgacttcccgctctttggtactaccatagagtcactcaagatccttgctgctttcatttaaccaagcactcttcttaacatttcaagagattgtctgttcccgttgtattaatgcaacaagagctgtatgaacctggattgtgacaacagacgggagcatgtgaagcaggacccagtgctgagttaggtgcaaggtgtcaagaaaggaagtagggaaagaattgtctggctctctggctgtgcaactgaggggttgttggtacctaccagcagactacagaattgccagagacaaccaagcacgggactctagagaggacgaagtaagaatgctgttggatagagtacaccagagaagcctcggaaccgtctaaataggcttgtacagtacggctgaatacactggttgcaaaagcagtttaaacactagtgatttttgtgattttgtgtgtgactagtcgtcttctcgggattttgcttgggagcacagcatgaagtattgcctgcgaatggggatttcatctgaagtgaccttggggttgtacattgtcaatgatttggaaatgttcacgttacatagctcagatctcatttcctggatcactcctgcaggctcactactacaagctgactaaaggggatgtaaggttttttttccctaaataaataattgagcaaaccaaaagaatgttgaacttcataccatacagtagttttcattatcctgtattgtgtttgcatagataataaataggaaaagaaggcacacgtcaaggaacatttttcccctcctaattatattttcaacttggctctatagacaaaaggctgcgtggtatgtactcaggcacgagcactatgctttggacatgcacttgagaacacacagggcacagtgtgtgcatgtggcatcacccacggtgtgcatgcacaggtatatacagaagtggtggcctctgcaagtgggagtaccaaatatatgacttactcagcaaaaaggaaggaatttgttgtttgtaggccaaagatgttgatcttttctcattaatgtgaaagaaggctatgcagctgtattgtacaaagggataatcatgaaccatacacagcaattcaatcgttatttaattacaattgaacagcatttaaaactcagtttcttcttgttgtgacccctagttccagattctacaggccagtagctggtacgtccagtcctgggcgctgccagtgcatcttttctaccatcacaggaagtccactagaaaatcaaacccatgctacttcctgtttttacacaacccaaggtgcaaagaatgaattttggattttgaaatgatcaaaaactgatccaaagaagaatattttggagcccatgaaatagcttgaaacagaaaattcaagaagttttcctaagcatccgcatgcccatttctttatgtgttgtctgggtttgtatctcccgtaccaaactgaacaattgcttcagagacaggacagcctacatagtcaaaatattttctgtgtggctccccctggggatagtttgccagcccctgagctaaaggaagggaaacagcagcgtgacaaatagttttaatagactattctgtgtaactcagggaaatcaaatgaaagaagagagcctttccagagctatactgatttgcttgccgggggacatttgcattttagactttcccaatgtgtgtccctggcaatgtagcctttctcgtgcatcgtgagggcccccatgagtccccatctgtctttgtctctctgtaattcttgtagaatctcttctcaacagttactttctatttataggtcactgtcttctctattgtccaaagtccaattaagttctctcaaaggtttggcaggggaatctgctgaccccccctgacagagaggccaattatcttctcaaccttctcttaagaaaaaggtggacacagggatgatttgtttgcatgggagctgatctaagctggcattattctatggccactcttaccgtttctcgagggtgaccccactaattaggacatgctgtcctttattgggccaagcttaagtacaagccagaaattcatcgacttatttctcacaaaaagttctgtatggctttttgaggatttgtgcagattcagggttgcagcttctacactgtgatgttcatgaatatcacagtgccatggtgacgcaccctaaaggacccgacccagctgattaaatggtatcagtgagtgagagaggaaaagacgaaacctctttttttttcctcctcacttacaagtcatattttgtttgttttttttttttgttttgttttcgtatgcttagaagtagttatttaggaaaagatctagtatatgactttctccagtagtgatcctcactgcagactcgcccagacctaagagaattcacttatgagacagagaatcattctgcattttcagaatgccttatttttttaatcacaatgaacgccaactcatcacatgtgtgctgatatataagctttgatgtctgaaagtctttgaaatgtatcccaaaactaaatgaggcagaaataagctaactcagtaatggtcaacggtagaatatcacagtgaatctgtggatgtctgctgttcatttcctttaaatgctacatatgcttgagaaattttctcataaaatattggagaaaaagcctctagaaagacactttatttaatctttaaattcctcaacgtttctctgaagcattgttgacttcaaaggaaagcctgagatgcaggtattactgctcaagatttcttgggcttgcatcaaattcagactcaaatgcaagtctcagctctggcatatatgtgactgttaatgtcaccctccctgtttcatgcattagccagtagaggatcattcacagtcacaccctggtgcaaagaagacagctaagagctttggctttgagaccataaagtggcctctagcctggtcctttctcacctgcctttcttatgcaccatctgtctttctgcatggttgggttcagagcatctttgtgccaccaggaagactttgctgctgacctaatggagatgagtctcccacattccaccttgagatgggactgatttccccatcccatcccccagcagtatctagggccacatagatgaatttattagaaagtatcatgaatccagactgactttgataaatgcttcagttttctgttttgttttgtcttgctttttttttttgtttacctatatccttgtaaatgtgttttttaaatgctaatattctcagttgtctgtgacttagaactgctggactgaaagaaaaaaaagtggaggacactaacaagaaaacaggccaagattgactgtgtttatcctctatcctctagaagtaagggggttccatttctgaatgaagttaaaccacatagcttaaaaaatcatgcaaagtcctgtaagaacctactgaatacgtcttcatgtattaagtatagtaaaatgtgtgccaaggctggcgtcattatgcacagccattcacttcctgtcactatcacagaagaatatcgatggaactttttaaaaagttcagctatggttctgaagcccaggaagtccttgagcaaaggacaacatctgagatcttgtgctgcatgacaacatggcacagagtgaagacaaataagcagatacaaagaaaagtgtgagcagggtctcattccaacagcccattcttgtaactaacccacctgcacaatgaccaaggtccctaccttggtaatccaatcactgtatttagctctacctcccaaccctaccacaatggagatgaccttctggaaacacctgaaaactagagcagtatatcttgacagggcttatattttagcccagatttcccatgggtaacacagggaatgccagaattccctaagcttcagatacagtttcaggaaacaaggctgttcttcatagatggagctccagagaaagtcagtctccccagctgctcacgttcacagtaatgtaccagggatgctatcatgctatcatggatccacatctctgactattcagtgatggacagtcacatcggatatcagcaatgagctccctcttgctaaattcttatttcacactctttgtgatcaccacacttttctttcttattggattattctggctgagtttacagtgtctcagtgctagcaatgtgaagtcaggtcattgtaaaacaggaggctgtaagacctcaggacatacctcagacatcggttagaatatggacaagacaccagctttatttattattgttgtttacttggaaggtaagctctatttttaagtgatcaactagccacgtattttttaaaagatttacttatttttctcttgtgtgtgtgtgtgtgtgtgtgtgtatgtatgtgtgcctggtatccacagaagagaatgttggatcccctggaatgaaagctataaatggctatgagctgctatgtgtgtgcttggaattaaacctgggtcctgttcaagagcaacaaatgctcttaactgctgagccatctctctagcccatcccattttattttttttaagtaatggatttttaaaaaataaatttcataaatgctttacatttattttaactgaaagtgattttcatgatatcaaaaaatctgtaccagcttttgaactaactcacaaaatcttctctgccattggcatacagatttttactaaacactccattggccaaaggatgctatccacaaagacttaagcctccacatctatagaaaagaaataattaccaaccgtaataaaacttagtggtcttaaattttcattagaacagttgtttatacttgctcagacaaaaggggagctttccagcatatttaataaattgtgtaacacttggttctaaaacttgtctgaggtaatacattaaagaaattaaatttcatttcattttgaagtatcataatgccagggaaattttaaaatgtagtcagggctatagaggctaacaccaggaaaagcagacagtggtcctggatggaggtccttttgcactaccatgtgcttgaaaggggaccttgatgaccattgacatgttaaaagctcaactgcaaaatatttactttccgtagatgtgagtacatgctggttctgactctgagcagattattagaatccctgtcataagactaaaaaccaaaagcctgacccacagatgactccctgtctaaaggcaatgtttgatcttcttttcagtgcacagccttgagataaagatctttattatgataattaactgcttccctctttgccaggtggattaatctgagtatttgaagaacccaagagggttagttaacttgatgataaagattcacttctatagaaagcacctcacagctgcacacactattaaggatcattaaatagcaagaagttgagtggacatcacacccccaccaaaaaatcaagggagtggctttttgccaactttttgctgttttgtaaaactccccacccttgtgatatctgtctcctgatcctctccacccttgtgatagccctttccttgtctgaagtagctgactgcagcctttgaagatctatgctgtttgaagcaccatcttgggtcccatcctgatgtatgtgtgatggtttgccacacacaaagtggaagagcccatgtacatcatggtagctattagcctgccctacatggcactgatgaatcaaatccatttgtggacttctgtctttcaagaccactcattgcatatttgctgtggaaaggcttctggctgtttatgctttgtaaattgacttgatcatctttccataaacatctcaccaatcatgcctcctagtacaaaaaatagtcgaaagcacatgcatcgcatttaatatatgattaattaatatatgattaattaatatatgattgatatggaccagtgaatcttagctgagccataagaaacctcaaaatttttcataatttaagtcaataaccaggtgttcttatgtcaataaccatggcgactcattgaggtatagcttcatctatctctttgaaagcagaaacagtgtgaatgattgagcccaacctttaactatctagcccagatatttcaaaccctggaatctacagacctctcatcgcctgtgctcaaacgcagcaaatggtcacttcagtcacaatccaaacaaatcagcacagattcaacaaatggcagaacagatcctaaagcttgatatgaagagctggaacgtgagtgagccctctcctctatacattattttttctacctattttatgaaacaagttgcatcatctgagaggagggaacttcacctgaggaaatgcctcctaagattgggctgtggggcaagcccaatcttttcttactgattgatgtgggagggctcagtcagttgtaggtagtatcattcctgtgctgatagtcctgggtgctataagaaaggaggctgacaaccattagactgagtgtggggtccccaatggaggagttatagaaaagactgaaggagttgaaggggtttgcaaccccataggaagaacaacaatatcaaccaaccagaccccccagagctcccagggtctaagccatcaaccaaggagtatacatggctccagctgcatatgtagcagaggatagccttgtcaggcatcaatgggaggagaggtccttggtcctatgaaggctcaatagatgcctccgggtaggagaatcgagggtggggaggtgggagtgggtgtgtgggtagaggaccaccatcataaaagcagggtgagggaggatgggatagggggtctccaggaggggggaaactgggaaaaggggataacatttgaaatgtaaataaagaaaatatccaataaaaaaaaaaaaagaaaaaagaaagaaggcaggctgagcaagccatggggaaccagcaagtaagcagtgttactcctctgtagtctgtcagctcctgtcttcaggtccctgccctgtctgagttccagccttgacttccctcagtgatggactgcaatgtaaaaatgtagacttaaataaaccctttccatccagggttgctttggttatggtgttttaccacagctatagaaacctaactaaaatataagtgaggcttaattttctttgttcactgaactgggccactgggggcccaaaattcaatcaaacattatttgggtgtctcagttggtttcttcttagatgatattaacatctgagtcaggaaattgagagacacagattgtcttctcattagtaaactaacgatttggcaagaagagaaaagatggcaggaagaaactactctgccttcactgtcagagctgagacaatcgatctctagccagagactggccttctgacccactctggaacatcagctcagctcaagtctcaagtctcaatcctgttgatttttttggtctagaccttgtcactttggtccccctggtttttgtgtcatcagacccgttttggaactacacattggcttcctgagatctctagcctgtcaatcacagatcttgagacttgctctcttccataaccacacaagccaaattcttattaaaaaaaaaactatctcagtatctgatcctgacatgaatgttatacagaatgctagagaagtggagttattggtataagtaaacctaaccatgtggcttgtaggcctcttagagtcatggttaagagcaaccttagagtgatgtaagcaggatttaatgaatgattctagtgatggttctcagactagaatgctaattgaattgcagaatgtaaaaccccagttcaggaagcatccgatgggaataagatccctgctatccttgaggcatttctcttacagtctaaaaagatctcagtatgttttgcttagcacctgatagtttgagtaaggctgagttcaaaagtgattgactaattaatttggtaggacaattttctaagtgtataatattaaagccgtgtcactgatgttatagtgagaagcacaagcaaaaagaagaatagaaggatatgggaaatatgcaccgtgtcccagaaaggatggcacattaaaagttgtaggcaaagcaagcgccaacaaagcagacatggttattaaaaaggcaagtgccattagtaagaatccatgtgctttcccagcaaaataagaaggtgtcttgagggtgagaccaccccaccattcaaggctccaaggataggaaagtttccttttaaaaagggctagttttaaagatgtcctgctgaaaatgactaaagaagtatcttttttcctcgagctgctcaggcactcagcacagccatggcccatgttggtccagctgtttcttgggttggtaacatcttcgtggcacccacttcccaacatgcagaatgcaagtaacaggattctgtagacttatatgttcagcaaagctggtcaaattagactaagtgcctcatgtcaggtctctgaggagtccctgagaggctgactcatgaagttgtgatggtgaagcctgagcttcacaggagacaaggaacgtgggatatcttctgaggagagctgctgtcactgagtagagtttgttcaagaaagaggacatatgtgtgatagacaacaggaccccaggtgtaggattgcccaagctggttagtgctcatatcacagcaccttgtgcctgagatgatgaccatctgtctacaggaaatcatacttgcactgctaagtgttggtctactttccttcattttttttttcgtatcctctaatacatcccatatagaagggagtatttactctaggacattgtatattagaagagtgtgactttctctttaatgttataggaactaacagtttgccttaagtctcagaaagttgagcttagacgttttgaacagagttcaaatggtgacgatgttgggaattcttgacattgaaccaaatgcattttgcctcggaagatggccatgtgggttatatgagcagcagacctagggatttaatattcattatggatttattgtgatatattatgtctcaatgtatctggaagatggacactatcaccatcctcaacacacacacacacagacctccactgaccatctctctccctctgtctccctgtctcctttctttcactctctgctttgtttcactaagtatcacagactggctttcaagacatagtttttagaccccagggctcccaaatactggcgtcctagatacataggctctgggcccagttttggtctctttcatgataaaccttgccgaagttcaagctagccaaccttattgaaggcaatagcaccaaaaccctgctgtgagaatgagttcatcccaggacactggatttcctcctccttttgaatttgaaagagacttattcagcctgaatctcaccaagagtaactgacctgagcagcctaacatacttccaaatttgaaagcagcttgatttcttatacaggcatggcagctcacaacaattctaaattcaaacattcatttccaccatcattttctgtggccacagtttatagaagtatatgtgctatcttatgagttattttctttaaaacacattgaagtatttattcattttgtggagtcctttctcaaacgatacagtgtctccccattaccctaattgctgttagttgtgactgtattttaaagaacagcaccatttagcatgactgctacaaatacagatgatttccctttgtggaaatgctgaggctaatttgtttgcctttttcccttctaaaacagagcttcttttaaaaagaaatgcaggacagctatagtaattaagaccaatatttttcttagttctctgttcagttaaattccacattgtgtctgcctcactataggggcctctttagcaaatgtatttcctatacatgcatacatatttgtgacacatatggaatatatagtatacaaaattacataccatatatatcagtatgtatatatatttcagtatgcatgtgtatatgcatactgagatatgtccatgcagctctgctcttatgttgtgataacattaaaatcagatttctagagtaccatgaatcatcactaaggttgaactatttgaattctacagagcagctgactgtattggggagggtgttggactctctagatcaccttctccagcgactctgagctcataatcttgccatgtgactcacacttgtggaaacatcttgaagtcattttatagaaattaacttatttggaggggccttaagttatttcttcagcttggtgcaaaacactaattatttggtgtatcttttgctttggagttaatatgagagtagacgtaaagaaaacattattcggcctcaactctggttagtattaaagttcttcataattttgaaagcatcttgggtagtgtggccattgtttcaaactaatataattaggataatacaaggaaatgatgacattagtgtaaaagagaatgagatataaagctgcagatactaggctgtctagtattctgaagagcatagtggagcagggatgctactgtgtaactcagggataatgtatgtgcttaccctgtgtaaggtcctaggttcagtctccagtaccccaatatttttaaatagtgggaaaaaatgaaagcctgggagaactgtcggagttagcttatgttatttcaggggtaagcaagcagtcctcaagaatccttacatagacattgcacggtgacatttttaatgcaaatattcgatcatttgggatagtgtttgtcatccttatatcaattaaacacagctagatgttattgttgtttctttctaatgactccagtattttgttggtttagtttaatcttataatacatcctagaagtctggttttgtgtcaagccagaattttatgttgaaatgttttatattatttcattttgcatcattgaagccaattaattcaggacatgaagttttattttaaatatttttcagcttttaaattttttatgagtataggtgtttagccagtgtgtacatacatgtgtgtgtgtgtgtgtgtgtgtgtgtgtgtgtatggtgtatgtatgtatgtatgtatgtatgtatgtatgtatttcagttatatgtcaggtatccaagaatgtcagaagaggacataagatcacctagaactggacttaaagatgattctcagctcccatatgcatggtggaaaccaaacctaagtcctctggataaagtcagtgtttttaaaatataatatatattatattttataaaattttaaatgaattttatatatacaagtttatatgtatgagtgttttgcctgaatgtgcctgtgtgtgtgtgtgtgtgtgtgtatgtgtgtgcacgtgcacactgcttctatgcagtgatcacagaggacagaacatgtcagattcatagaactggaatttcaaagagctgtgagctttcatatgagcactgggaactgactggggttctctgcaagggaagctagtgctctcgactgctgagccatctctcaagcaccacattaggagctttacttatagactttaggatgaaattattagggaataacaaattaccaaaaacatgaaagaaaagaagctatatattatagatacatgtcctttaattgatgttagcctatgcattattcttttaaaaagcttgaaaaccagagatgtgcctatgactgcttaagcctagagaatcagcctgtcccacccatccatgtttcaccgagttgggaagacatgacttcctagcatcatctggacagattacaagtgcacagaaaatcttaaaggacatcagaaggagctttctggctttggaaactttaattctctgaaaagtgaaaagtgcattggccacccagtgtactgcatttccatgctgagacaaaattcaaatagacaagtggtaatttagagcattggtacccaaattttccaatacccctaaaaatttggtacttccttcctcacgcaaagctttttgttaaattatggaattattagactgatacctatatttatagaaataaagattatatatgtgtgtatatatgtatatatatatacatacacacacttcaattttgatagaaaataaaaatagaaattggaaaagtaatatttagtcttgtttgttagtgcttcaaaatagctcactgttcccaaggtaaggaaacatatttggacagcttccataataaacatgtatgttgggacagcctccatagtaaagatgtaggttaagacagcctccataatgaacacttgtatttggacagcctttataattttcagaatacttgatttgacactgtgatacagaaatcgataatcaaatttgagcactagacttttttttttaattcccgattttaatgattgttgccgtccctcaaaatatactcttacagatttgaaaatctaaatgggagaggcatcccccacactcctgtggttactatatctcctgtggtatactataccttttatttaatcctaggcaccaattataaaggtttgtgggtaataactaatgattaagttttaagtaccctgtgaattctgatacctttgaattctcataattgtcctgtatacttgagagaaacgtcattagacatagaaaaaggaactctacatttcaaacactcaatatttgcagaacgattcttctatgatcatagaatataggagagagagaggaaaatcaaatctctcagttccttttactcaccactcacgtggctgctcacgtttccttctctgtcactttgtagaggtttgatccacctagtgacgcttgtttaaaatagataagctagcctgtaaatcctctcagcccaggtatacgtggaatgaaagtgatgtagctggaaactactgtataaacaggagtaccactctccacccatcaaatcatacacggagattttcacatgaaagcagaaggaccaagaactagaaaagcacagaaagtttgagtaccacagctaatcaatataacgtgaaatgcactacattcaacaagaggacaatacatactcaacaacacattgactttaccagcatagtctatagataaagtcataaggcaaggctcaaacctttaagctactgaagtcatgctgaagatgtttttggaccaaagctgaataagctggaggccaataaccagaggaatatttaaaatctgcaggtatttggaaaacaggcagtagtattctcaataaatgcatgggtcagaaaaaagaaagcaaagttagaattagaacttaatattgaactggacatatatatataactcactaaatatatattatatatggcatgttatataatatattataatacatcacatatgttttataatataataattataattatatattatagtacatattctatatacacaatataaagtatatcatatatttttacataattatatatttcatatacatatataagtatatatatacatacatatatatatatatatacacacatttccctaatgtatatagaataaaacttctgagttcctgtaggagagtgtgggacttaactcatgtttaatatgataccacatgaagacagaatagtactctactcaggttctagctcaagaaactagaaaggataccacatcttagggccagagagagcaaaaagtaggagaagctggaaaagaaaaaaagcatagagcagcaaaatggaaacaatcacagaaaaaaaaaatccatgaagttagcagtttgctttgtgtgtctaaaaagattaataaaattgataagtccctcctgcaagactaatttctctccagttcattgtgctctctgttgctcagatacaaagcatttactttgaagttccaatttgctaaacttctttacaagccaattttcattttattatgccagattttttaaagactatttttcatcagttaagttgcattatgtggtaagagaataattacgataaccaaagagttcagggagaaaaaaatgctaagggaaaatgagactgtgaccgtgtggagcccagggtgacatctaacatggtaagtcctgaatagactctgagaaggagaggatatcttagtcatatttttaaatgaaaatgaactctgttttgcctttaaagagtcaggataacatgaccacaatgtctagggttttttttgtttggttggttggttggttgggttttttgtttttgttttttgttttgttttgttttgtttgtttgtttgtttgtttgttttgcataacagatacactcacatgcccagtctccttggggcaggatggaggctgtataaccctgtaataatatagctctgcatgactggtatataaagctacaatgcagcacaccagtggttttaatggccttagccctatactcaatctcctactcaaagattctggcactgtaaagtgtatgcatattgtctggggtccatcaaagcaaaggctccaaatccaaataactgaacaaactttacaacaaagtcaacttctatagtcccactttatagcaagcttccagatgtcaatgttgctggaccatggtccatggtcacttgctactacattagcctctttcatatccataggggtaccttccaaggccttcagaagctgaaaatagtaccacaccctatgataaagtaagaggctaacaatagcaataataaacagaataatttctgcaatatattataataaaatgcatttgatttattatatgtgaagaggaaaattccaagtcaaaagtcccgactagtgccctaaacaccaagccatttaagtagctgaccctcaggcagtacaccatctcgttagcagttataaagtgcaaagttgcatgatgtgatggtttgaagcgtcacttgaaagttgaagatagtgccaagcatgcatagtgtgcctcttttaacaatatcagtcggcaggaacagcacagggggtccattttaaaaagtacatgattcattgggagccctaagctttaccttcattgccccacacctgtgggtgatccatctacccatttactgccaatttcattctctaggctagggctgccaactttaagttaattattgaaatccaaccagatatgagaagtactgatccctggtcctcaacccccaaatcttcatgtaataagcttggcaaaaagactggctattataaatgtccatgggtgattttcatgtgcagccaagattgaggacttctaactaaattagtctggggaccaccctacaagactcctaagccagcatctttagagatgctgatttgaaagaacaacccattctctactatattatcctctttcatatccaaaaaggtaccttccaaaacctcagaaactacagacagtaccgtaccttatgataaaataaaagatttacggggctggtgagatggctcagtgggtaagagcacccgactgctcttccaaaggtccagagttcaaatcccagcaaccacatggtcgctcacaaccatccgtaacaagatctgactccctcttctggtgtgtctgaagacagctagagtgtacttacaaataataataataaataaatcttaaaaaaaataaaaaaataaaagatttacaacaatattaacagaataattatggaaatatattataataaaacatattgcattgattatgaattttgtgagcttattacacctctagcttttaatctagtatcatcagactgcaattgcccatagacaagtgagactctaaaaagaaaaccatgtggataacaggatatagggtatatatacaggacttaggttaaggaaaccctgagccctacatagagaaaccctgtcttgaaaaaccaaaaatataaaaggaagccctgagcccatgttctctttactgtcccactccactctgccctttagtcacccttggagttagatatgggcaaagtgactgtaagttctgctaccaggaactctgacctgggagagtggacctagaaagaggcttggaaagaagtaagtgacttctggtaattgtgtgggccttttttttttaaataataaccacttttcatcactagcttgatgcccagtacagttgattttgatccacttggagccagttcagagggattcattcccacaggacctcttccagtttagttgcaagtgcagtcctggattccctgactataaattagaacccaggtaggttctttacttatatctaccagtttttaaaaatatagagtgtcttttggattgtattgctatgacaagatatttaaaactggataattcatttttaaaaagtcagtttctcacagtcttggaggctaggaagcccacaatcaagtcactggcagatttggtcatttaaaactgtcaacttgtgtaggagaaggaccccgtgcctgcctgagcgaaggcagaacattaagagagctcagatatgcatgaaggcttagttcatacaaaattaaccagacccaagtgtatatgattcataaggtttttaagctcttttctaaggctctcaatctcctttcatgaaggagtcaccaatggcctcatcctcttgcaaagaccctaccttggtttctgtttatgtagtgctgacttgtgcatgctagccaagtgatcatcagggctgtacacatagcccagacctacttcttgctgccatcacattgtccagaagggggctggagagatggctcagtgggtaaaagcacagactgctcttccagaggtactgagttcaattcccagcacccacatggtggctcacaaccatctgtaatgggatctgatgccctcttctgatgtgactgaagacagagacagtgtaatacatgtttaaaaagatagtctcaactcttgaatttcgtagagggcaaagtcaagagagagccccaagtacagaagctgtatcagcatggacactctcctaccattattctgagttttaccatctctagttccccccagttaaagattccaactctactcactttgtctttctcaagataagtctcatctaggagactgtccagagacctgatcctaatagatccaattagcatcaagttatggttgaaagtacccattgtgattaacggaagataatcctcctaccgagaaggctctgaggattgtaggagctgtatgctgggaacttgggacaaacactaaatattatattatattatattatattatattatattatattatattatattatattatattatattatattatatcatgcttggacatctctaaaaagtagaactcagcttcagggcctaggccagtccatccatgtgaaatgtgtttacggaagagagccagagggaccgaggagagtccagggaatccctcttctggctcacagtgaccgtctggatgggccctgtgagcctagtgttaactgttttctctagttttcctgctacatacccaaggtgttcttgggtaaacacagcctgcaagagaagcagagctaaagaatagcttctctttcttctttttgccaaacacttcccagttctcagcagagcctgagagctacaagcaatgccaaactaggaatttgtcacacttctccagatggatcatgtttaggggcttagaagccaaatacttagtctgcaaacagtttatcccaggagaaaatgactaggccccaaaggcaaatgggaggaagacttgctggctacattttccgtgccgctgagttctttctgttagaacattgccatagtcagacacttcagtaggatctgcttctacctggatttaccccaaaaagtacgtcctaccttgtgattttgaaataacgataaaccttattaattcagttctcttgctacctgtccataggaactctctcctgatatcacccacagcatctggaaggttgtcttgccatcctcattttactctagaggttagaggtataaggactgaccactggtcaagctcatatggctgtccacccccagaattaacaggcaagctgaccctacaattccattctgtaagctccaacctgaaatcgcgtctttaaaggcctcccaagtgcgaatgccacagctttcaatctggagccccgtgactctgagcatggtttcctttcccggagcaaaggggatagcactacaaaaatccccaaatatctgtcatggacaaagtagacccctttaatttcactgtaaaccacggcactagaaattatccgtaggcacattgattatttttcctgtcagagccaggaactgcattcagcaagtatacaggagggctatatccacacatatagctgggccgatattgcttgtgaattacaggtttaccggagcatccagaggcattcacatttgggaataccagattgggaaaggccagattttctttacttggtcaggaaaagactggaaaagcatcagtaattctcaacctaaggatctgagaagtagaaacataaattcccctcctgctgcactctgaatgtctttgagcctctgaagtccatgttgaaatgtaacccacaatgaaacagtgccaactctttaggagcagatgagtgcccttgtaagggcttgaggcagcctgtccttgttttcgtttctccatggatggcaatggaaagaggtaccaccctggaggtagggagaagcccttgccagacactgactctgttggcatccttgacctagaacctcccattctctggagctataggaatgaatttgtgggttatcaatcgcccattgtaaggtattgttgaggcacagcatattccaggaacctgacactgacaagactattccagccagtctgcaagtcataagttccaaactggtgaactgtttggaatgagccctaaacacaagctgtgtaatgcacatatcagcatgacactgcgccttacttttcctttcttttgataaacaagatttctttaccaaaataaaaggtcccttgcttcttttattttgttggtggtggtggttttgtttttgttttttgggtttctctgtatagccctggctgccctggaactcactttgtagaccaggctggcctcgaactcagaaatccgcctgcctctgcctcccgagtgctgggattaaaggcgtgtgccaccttgcctgactccttgcttcttttgaagtacaagaagaccacacttagtctatgttcctaccacttccctgtaaaggggctcatatccaccatttgtccacagttaccctgttcccatggtctctggctgtgaactccattaccatttgactcgaatttctcacctggtttctttcggcatgtttaatcactgttactatcctgcattttaaagatccttagggttatgatttatgcatttgcttatataaacctttcttcagtgggccacactaagacacaagtagtcatttcttcaggatctataataggctgcaaaacaacccagagtgatcatcccaacttgggtccctaagagccttattctggatggcagtgggatgctctttgcctagcaagtcaatatgactccagtccacagtgccttagattttaagttgatgggaattccagggctatgtaggttcacaccctgatagtttgccttcatcaccagagttaatgctacccaccagatgttacagccctgggcatccatcctcgttcaccatcctttatgctttctgcttctttgctgcttcttactcattctgtcatctcattcatattgaggttatgaagtgtcactactaaattctggctaatgtcattagtgaaaatcttctgattaggtctcccaaaagcagcaagatcaatcatttctgagcccttaattatagaccttgaaagaaatctccctgttgagccaagtatagtggttatctcctataatcctaactcttggaagacaggaaaaccaggaattcatgtttagcctcagctatatagagatttgaagccagcttgaactgcttgagacattatctcaaaaataggagtaataaattaattaattaaaaaagaaattctcattattacaaagagctcctctttatcaataataaagcaatcctccaagacagtgctaaggaaagccagttaactgtatgcagtgtgagtctaacactggccatgctcagtgacattatctctctgggtctgacttgaggaccccatcccaggaagtagtacagaactggccatatgctggtgttctccggctaagtttgcagtcctgggaaatatgttcttaccacttccttgtcatcagtagagggttagtcacataagaaatgtgtgagcaggcaccccagtgtgccccttctaggatagatgagttgggtgagagaagtagcactttcacatccaaaggcatgaaagttccagtaatcatcagacatctgcaagcaccgtgtgagctctgatttcatttctctctacacactgttcctgttctactataataacagtcattcctgcctccccagggctacctactgtaatggtatcagaaacacagtaaacagaaaatcgcatccatccagccctggggagcccaggaatgatagaagtgagcttttatcacttccatcgtctggtggtcagaagtttcactgtgtcagtctacaagataatagttcctagaaccgatgggatgctgagagccagggaggtcacctacattttgaatgtaaatactccagtaataagtccctctaaggataataggaaaaacatgtatttgaaaacttctcaagaactcatactataccacaccacacacacaccacaccatatacaccacacatataccaaacacatacaccaaacacacataccacacatatacacacacaaaacaaacataacaaacacacataccacatacacacacacacacacacacacacacacacacatacacacatacacacacacacacacatttcattcaggcaatgatggggatccaacagtccattcaacactaatttgttacagttagaataagtgggtctacatgtcataacctgggttaaacactatttagtgagtggtttccccctgcccgatatgaccaagagccataattgagtagaagtatagaatgtacagcctcgccagggcaacaaagtaagccaaacaatgcagggtggctatgtctgtagtaatggtagtggagttgttgatactctctagcagagaaagctgtagaggtctcccataagacccttgcctgcaactctacctgttaactcctgctgtcaccagctgtgtggtcttaggtgagagctaaagtacacagtagatgaactgttttgaaaggactagtccatagtgcacttccttgacacccgtgctggtgcggggttttcagtgatgtgcagcaggtgagctgtgcacattcttgtaaaaaaaaaaaaaaaaaaaaaaaaaaaaaaaaaaaaaaggcctttgcgcacagtcctaaagagtaacctccatgaactcattggctcaccaagcaggactttggtagaatcattcctctagtgtgtcaatgtcctgtgtgaggtgagtagacacttgataacatctcccccaggaagtagctcaggactctaaggctagagatgctgaaccaggaaagatctctcaaatccagagtttaagatcagcctggccaacatagtgagacctcgtttccaataagacgggataggaaggacccaaagagcaactccaacttgagaaactatgaaaacatatgcctattaaggattttcaaaaacagtgtagggaagaggaaagataaagcctgtttctctgactgaatctaaacatgtattggccaggagtacaaagcatgagaaatagttcaatacattatttcnnnnnnnnnnnnnnnnnnnnnnnnnnnnnnnnnnnnnnnnnnnnnnnnnnnnnnnnnnnnnnnnnnnnnnnnnnnnnnnnnnnnnnnnnnnnnnnnnnnnnnnnnnnnnnnnnnnnnnnnnnnnnnnnnnnnnnnnnnnnnnnnnnnnnnnnnnnnnnnnnnnnnnnnnnnnnnnnnnnnnnnnnnnnnnnnnnnnnnnnnnnnnnnnnnnnnnnnnnnnnnnnnnnnnnnnnnnnnnnnnnnnnnnnnnnnnnnnnnnnnnnnnnnnnnnnnnnnnnnnnnnnnnnnnnnnnnnnnnnnnnnnnnnnnnnnnnnnnnnnnnnnnnnnnnnnnnnnnnnnnnnnnnnnnnnnnnnnnnnnnnnnnnnnnnnnnnnnnnnnnnnnnnnnnnnnnnnnnnnnnnnnnnnnnnnnnnnnnnnnnnnnnnnnnnnnnnnnnnnnnnnnnnnnnnnnnnnnnnnnnnnnnnnnnnnnnnnnnnnnnnnnnnnnnnnnnnnnnnnnnnnnnnnnnnnnnnnnnnnnnnnnnnnnnnnnnnnnnnnnnnnnnnnnnnnnnnnnnnnnnnnnnnnnnnnnnnnnnnnnnnnnnnnggtgggacttttctcagcacagcaggagtcttggtgattagaaaggcaaagactcttataaaatggtcacagctccagtggccctgtgccagctgcaggggctccctgactttttcccctcgaggaatcttccagtaaagctgcagcatttactgaaataaaagtactggtgggtgaggtggctcttggtaacatctcttttctctccctgctctaccatggctcagccccttccagcctccccaagacttaaccaagattacagaaagattccagaccagaaatgtgttgtgtttgggagagggaggagaagagggaaattcatgatgaagcctcgttgcctttaaactatttataataaatttccactagaaaagagcctttggcagacaatcattttcttctgctgcagcatgaccaaatacagtaagtattcaaaatgaaaaactgaaaggcaagaagaggagcctacagctggggcaggctgttttcagatctcacactagtagatgagaggaaaccaggaggggagccccacctcagccccagtatctcccattttgctgctctgaagggctaggaagccttctccattagacaagcctccttcgtgcttcaccttaattttcctcgcataattttaaatacagatcatgtctacagcgcagcaattaatggatagcctaaagacttattatttccaactaattgatatgtaggaaaagtttaaataacataacagggatagggaaaatttgaaatgatgtgtgctcagtgcatttagagtttgttggaggtagcgaaaaacacctgaaggaaaagggatgtgacctaatggagaattgatacaggaatctccctttaatgtttgtgagcatatggatggagaagtggctcaaatatcacaaaatggagttaagatgttgacaggttctctcccactcacccccgacccctgttctaagatgccttaccagagaaatggggttgagactgtattttgaacaatgttgttggtaaggaggtagaaataagaaaaagaggccagcatttccatcctaattttttgttctcccttgacaccagctggaggtggaagtctccaaggtcaagttgacttagctgccatagaccctaccccaaacgaccaccacctccatgtccaaggtcccagcaaaataatgcaatgcatcacattcctggcaagtgtagaatctgccacatggactagtgacttttcaaaattcactagttctatttttctgcttctttggttttgttttggtggcagtctcctgcccacatgtagctcagactgacttcaacttctcaatggaattgagagtgaccttccttcctcctctctcattctccacccttacaacctgaggtcaggtgataggcctgccccaccacacccagttctaactctgaactgcatgtagtaggtagccctatgctacattttaagaattggaaaacattctttgtttacaactttcccttcttgatgtctcatgaaagatcctattagtatannnnnnnnnnnnnnnnnnnnnnnnnnnnnnnnnnnnnnnnnnnnnnnnnnnnnnnnnnnnnnnnnnnnnnnnnnnnnnnnnnnnnnnnnnnnnnnnnnnnnnnnnnnnnnnnnnnnnnnnnnnnnnnnnnnnnnnnnnnnnnnnnnnnnnnnnnnnnnnnnnnnnnnnnnnnnnnnnnnnnnnnnnnnnnnnnnnnnnnnnnnnnnnnnnnnnnnnnnnnnnnnnnnnnnnnnnnnnnnnnnnnnnnnnnnnnnnnnnnnnnnnnnnnnnnnnnnnnnnnnnnnnnnnnnnnnnnnnnnnnnnnnnnnnnnnnnnnnnnnnnnnnnnnnnnnnnnnnnnnnnnnnnnnnnnnnnnnnnnnnnnnnnnnnnnnnnnnnnnnnnnnnnnnnnnnnnnnnnnnnnnnnnnnnnnnnnnnnnnnnnnnnnnnnnnnnnnnnnnnnnnnnnnnnnnnnnnnnnnnnnnnnnnnnnnnnnnnnnnnnnnnnnnnnnnnnnnnnnnnnnnnnnnnnnnnnnnnnnnnnnnnnnnnnnnnnnnnnnnnnnnnnnnnnnnnnnnnnnnnnnnnnnnnnnnnnnnnnnnnnnnnnnnnnnnnnnnnnnnnnnnnnnnnnnnnnnnnnnnnnnnnnnnnnnnnnnnnnnnnnnnnnnnnnnnnnnnnnnnnnnnnnnnnnnnnnnnnnnnnnnnnnnnnnnnnnnnnnnnnnnnnnnnnnnnnnnnnnnnnnnnnnnnnnnnnnnnnnnnnnnnnnnnnnnnnnnnnnnnnnnnnnnnnnnnnnnnnnnnnnnnnnnnnnnnnnnnnnnnnnnnnnnnnnnnnnnnnnnnnnnnnnnnnnnnnnnnnnnnnnnnnnnnnnnnnnnnnnnnnnnnnnnnnnnnnnnnnnnnnnnnnnnnnnnnnnnnnnnnnnnnnnnnnnnnnnnnnnnnnnnnnnnnnnnnnnnnnnnnnnnnnnnnnnnnnnnnnnnnnnnnnnnnnnnnnnnnnnnnnnnnnnnnnnnnnnnnnnnnnnnnnnnnnnnnnnnnnnnnnnnnnnnnnnnnnnnnnnnnnnnnnnnnnnnnnnnnnnnnnnnnnnnnnnnnnnnnnnnnnnnnnnnnnnnnnnnnnnnnnnnnnnnnnnnnnnnnnnnnnnnnnnnnnnnctacatctgggtcctttcagtaaaatcttgctagtgtatgcaatggtgtcagcatatggaagctgattatggggtggatccctggatatggcagtctctacatggtccatcctttcatctcagctccatactttgtttctgtaactccttccatgggtgttttgttcccacttctaaggaggggcatagtgtccacacttcagtcttcatttttcttgagtttcatgtgtttaggaaattgtatcttatatcgtgggtatcctaggttttgggctagtatccacttatcagtgagtacatattgtgtgagttcctttgtgattgtgttacctcactcaggatgatgctctccaggtccatccatttggctaggaatttcataaattcattctttttaatagctgagtagtactccattgtgtagatgtaccacattttctgtatccattcctctgttgaggggcatctgggttctttccagtttctggctattataaataaggctgctatgaacatagtggagcatgtgtccttcttaccagttggggcttcttctggatatatgcccaggagaggtattgctggatcctccggtagtactatgtccaattttctgaggaaccgccagactgatttccagagtggttgtacaagcctgcaatcccaccaacaatggaggagtgttcctctttctccacatcctcgccagcatctgctgtcacctgaatttttgatcttagccattctcactggtgtgannnnnnnnnnnnnnnnnnnnnnnnnnnnnnnnnnnnnnnnnnnnnnnnnnnnnnnnnnnnnnnnnnnnnnnnnnnnnnnnnnnnnnnnnnnnnnnnnnnnnnnnnnnnnnnnnnnnnnnnnnnnnnnnnnnnnnnnnnnnnnnnnnnnnnnnnnnnnnnnnnnnnnnnnnnnnnnnnnnnnnnnnnnnnnnnnnnnnnnnnnnnnnnnnnnnnnnnnnnnnnnnnnnnnnnnnnnnnnnnnnnnnnnnnnnnnnnnnnnnnnnnnnnnnnnnnnnnnnnnnnnnnnnnnnnnnnnnnnnnnnnnnnnnnnnnnnnnnnnnnnnnnnnnnnnnnnnnnnnnnnnnnnnnnnnnnnnnnnnnnnnnnnnnnnnnnnnnnnnnnnnnnnnnnnnnnnnnnnnnnnnnnnnnnnnnnnnnnnnnnnnnnnnnnnnnnnnnnnnnnnnnnnnnnnnnnnnnnnnnnnnnnnnnnnnnnnnnnnnnnnnnnnnnnnnnnnnnnnnnnnnnnnnnnnnnnnnnnnnnnnnnnnnnnnnnnnnnnnnnnnnnnnnnnnnnnnnnnnnnnnnnnnnnnnnnnnnnnnnnnnnnnnnnnnnnnnnnnnnnnnnnnnnnnnnnnnnnnnnnnnnnnnnnnnnnnnnnnnnnnnnnnnnnnnnnnnnnnnnnnnnnnnnnnnnnnnnnnnnnnnnnnnnnnnnnnnnnnnnnnnnnnnnnnnnnnnnnnnnnnnnnnnnnnnnnnnnnnnnnnnnnnnnnnnnnnnnnnnnnnnnnnnnnnnnnnnnnnnnnnnnnnnnnnnnnnnnnnnnnnnnnnnnnnnnnnnnnnnnnnnnnnnnnnnnnnnnnnnnnnnnnnnnnnnnnnnnnnnnnnnnnnnnnnnnnnnnnnnnnnnnnnnnnnnnnnnnnnnnnnnnnnnnnnnnnnnnnnnnnnnnnnnnnnnnnnnnnnnnnnnnnnnnnnnnnnnnnnnnnnnnnnnnnnnnnnnnnnnnnnnnnnnnnnnnnnnnnnnnnnnnnnnnnttggaatttttagggtcacttataatatactatccatatcatctgccaaaaagtgatattttgacttcctccttttccaatttgtatccccttgatctcccttttgttgtcgaattgctctggctaatacttcaagtactatgttgaaaaggtagggagaaaagtgggcagccttgtctagtccctgattttagtgggattgcttccagcttctctccatttactttgatgttggctactggtttgctgtagattgcttttatcatgtttaggtattggccttgaattcctgatatttccagaacttttatcatgaatgggtgttggatcttgtcaaatgctttttctgcatctaacgagatgatcatgtggtttttgtctttgagtttgtttatataatggattacattgatggattttcgtatattaaaccatccctgcatccctggaataaaacctacttggtcaggatggatgattgctttaatgtgttcttggattcggttagcgagaattttattaagaatttttgcatcgatattcataagagagattggtctgaagttctctatctttgttggatctgtctgtggtttaggtatcagagtaatagtggcttcataaaatgagttgggtagaataccttctacttctatctgttttatttgttttgtttcgatttttttttaaaaatagtctctcaccaatgtcaaacaagtccacacttattcaaatgttgtcaaagatccaggagcatgaggaagaacttgaggtctcttgaacaggtctcaagactgagcaatgttactaatatatcacagataggattaacagacagtggtgttttctacatcaatcactcttacttatgttaaacatactttttctatgtatataagaaagtttttataattttttggtggtttttgttttgttttgttttgttttgttgtgtttttgttttgttttgttttgctttgctttgttttgttttgttttgttttgagacagggtttctctgtatagccctggctgtcctagaactcactttgtagaccaggctggcctcgaactcagaaatccgtctgcctctgcctcccaaatgctgcgattaaaggcgtgtgccaccatgcatggcaagaaagttttaataagtatagtctacttgtactggttaaatatggttctagtggttttcacatccatacaactttttttcccatttttattaggtatttagctcatttacatttccaatgctataccaaaannnnnnnnnnnnnnnnnnnnccccatacccgcccacccccagtcccctacccacccactccccctttttggccctggcgttcccctgtactggggcatataaagtttgcgtgtccaatgggcctctctttccagtgatggctgactaggccatcttttgatacatatgcagctagagtcaagagctccggggtactggttagttcataatgttgttccacctatagggttgcagatccctttagctccatacaactttttatgtcatgatcacattatagttatgtatcccttctctgtgggtgggtgttttagtgattttcaagagcttgctgtaatgagaagatctgttattattcatgtacagtgtgatggtttgaacaggtatggcccccatagactcagttgtttgaatgctggcccatagagagtggcactattaggaggtgtggccttgttggaataagcatggctttgttagaggaagtgtgtcattgtggagatgggctttgaagtctactatgttcaagctacccccagtatggcaagcaatctcctgacttcagatcatgatatagtatttttagctccttctccagcactgtgtttccctaaatgctaccatgctctccaccatgatgataatagactaaatctttgacactgtcagccaccccaattaaatattttccttttataagagttgccttggtcatggtgtcttttcaaagtaataaaaccttaactaaaacatgcagtatctcctaagatgtataccatgtgtgagttgtaccaagtatatcattgctgtgcctttgggcatgggcttgttcaggtttaaagatgaggctgaaccatcttccaaagcacctttaacacactgcatttccttgactgctgtgtgggaaaccctgctgatttagacgcttgccatgcctgctttttaaacggcacttcttgtttttctatattttattattagttttctctttgtggtttttatttgccttttcctggtcaaagaagacaatgatctcttttttttccccatttactactggtttggttctggctaaatgtatccctctcatgcacacacctttgctaggttgccttgttgcttgtaataattgtttatagagcccaaagccactcttgtcacatgtgttcattgctaacgtctctgtcctgtttaaacattgtttctcacgttactgaagattaaatttgcgtataattgataaactcccctaatttacctgtactgaggcatctcaaagcaaagactgaactggactaacaaatcatctaaaatatcccaagttttggtttggcttttaaatcatggaagtatctaaaattatgtgtagtgcatgagaaattaatgcctggtttatccctatgataatcatctttgtaattatgatctatcttacgtataatctatctttctcctgccacttagccatggtctcatgatcatatgacagtgttccatcaatcctgtgtcagtgtctatgatccccatgctgttcctggagttaagtcatctatatttgtattataccaaactcttgactattctttttttattaggtatttagctcatttacatttccaatgctataccaaaagtcccccatacccacccacccccactcccctacccacccactcccccttttaggccctggagttcccctgtactggggcatataaagtttgcgtgtctgatgggcctctatttccagtgatggccgacgaggccatcttttgatacatatgcagctagagacaagagctccggggtactgcttagttcatattgttgttccacctatagtgttatagtttcctttagttccttgnnnnnnnnnnnnnnnnnnnnnnnnnnnnnnnnnnnnnnnnnnnnnnnnnnnnnnnnnnnnnnnnnnnnnnnnnnnnnnnnnnnnnnnnnnnnnnnnnnnnnnnnnnnnnnnnnnnnnnnnnnnnnnnnnnnnnnnnnnnnnnnnnnnnnnnnnnnnnnnnnnnnnnnnnnnnnnnnnnnnnnnnnnnnnnnnnnnnnnnnnnnnnnnnnnnnnnnnnnnnnnnnnnnnnnnnnnnnnnnnnnnnnnnnnnnnnnnnnnnnnnnnnnnnnnnnnnnnnnnnnnnnnnntccatcctttcatcacacttccaaattttgtctctgtaactccttccatgggtgttttgtttcctattctaagaaggggcaaagtgtcgtccacactttggtcttcgttctcttgagtttaatgtttttagcaaattatatcttatatcttgggtatcctaagtttctgggctaatatccacttatcagtgagtacatattgtgagagttcctttgtgattgggttacctcactcaggatgatgccttccaggtccatccatttgtctaggaatttcataaattcattctttttaatagctgagtagtactccattgtgtaaatggaccacattttctgtatccatcctctgttgaggggcatctgggttctttccagcttctggctattataaataaggctgctatgaacatagtggagcatgtgtccttcttaccggttggggcatcttctggatatatgcccagaagaggtattgctggatcttccggtagtactatgtccaattttctgaggaaccgccagactgatttccagagtggttgtacaagcttgcaatcccaccaacaatggaggagtgttcctctttctccacatcctcgccagcatctgctgtcacctgaatttttcatcttagccattctgactggtgtgaggtggaatctcagggttgttttgatttgcatttccctgatgattaaggatgttgaacattttttcaggtgcttctctgccattcggtattcctcgggtgagaaatctttgttcagttctgagccccattttttaatggggttatttgattttatggagtctaccttcttgagttctttatatatattggatattagtcccctatccgatttgggataggcaaagatcctttcccaatctgtactcttgactattcttaactccacagcacaacctggcaggcagattccacagttcttctttagcattgccttggctattgataattcgatttctgttactgcatcaaatgccggaggcactgcctcataaaagctcagctaatttttggctcacagttttcaagtttttcatctatgaccagttgagctcattgccgcaggcctgtgatggcacagtacatcatagtcaaaatgacagtcaaggaggcctacttaccttatggtagcatgtgggaaaagagagaatgagggaggggggtctagtctcactctgacttaagagagagtaaagaaggggtggagtgggttcctctgtgacccagggctttcaaaagtatcttgacctatggcctcctatgaactcttaaggtctccagagcttcccagtagcatcaaattaagggccaaagcttaacacagccctttcaagatcaatttttggctccttattcactggaatcatagaattcttttttcttgcctgtaagaaaagtcttaagtccttaggagtctgctttctcaaatgtgtttttaagcagctttaaggcatcgtttttatatttcctatttttgaactgtcttttgagccctcttgtaaattcagtccagccatacctataatcctcatgtctaaatcccaccagtaaacacacgcacatcctccattgcctgctcttgtatgcaggcgattatagtgatgtttttctgtgctcattataaaatatttacatatgtgcttgtacttgataatagtgtctaggtacctgagtctcagagttgaattgctctaacaagtcacgagaataattggaaagagcatttgttctgggcatcaggccctaatgttgtgtagaaatggaaaattttaagtgaacgtgacagatcaaggatggcccttgctagagtgaggcagagatcatgtgaagctgggtggtagaaggctgtacaagtcccactgagagccatggatcctttgcataatttaggctgtctgcagtgtagatgtccagggccatgcggttcactacaatacctcccagacgatgtgatcaggcattttaatgtggactccacagggtttcttgtcaatatcatggcaggaaactattacagtagtacaaacagtgtatgtacaccttatgtgtcaagaaggggttacttaacaagtgatcaaataaacatatcctaattaatagtaggttttaaaaataagaccttattttttcaattggatattttatttatttacatttcaaatgttatcccctatcccattccttaccctgcttctatgaggatcctcccccacccaaccaaccactcctgcctcactgccctagcattcctcaacactggggcatcaaaccttcacaggatcaagggcctcccctaccattgatgccagataaggccccttcagttccttcagtccttcccctaattcctccattggggtccctgtgctcattctgatgattggctgtgagcatccgtattggtcaggatctggcagaacctctcaggagacagctgtatcaggctcctgtcagcaagcacttcttggcatcggcaatagtatctgggtttggtgtctgcatgtgggatggatccccaggtggggaagtatctggattgtctttccttcagtctctgttctactctttgctcctgtatttctttagataggagcaattctgggttaaaattttggaaatgggtgggtgtccccatccctcaaccaggggcgggggaagagggaatgcctaatgtctaatatggaataagaccttattttaaaagggactttagtaagcaaaaaacccactctgtttttcccagttctcggtgtcagggtagtatggtctggggattagaatgtcagaaaaacaagggcaacaaaggcatagctagtaagagttcctctctaacctgctactgtgttccctttctgagacataacccagtgtctcagattgtcactaaggcaagaccactagcacctatgcctgaaaagtcacaaaggtggcagcctatgttccttattgactagtccattgtcctcacaggttctcctgggaaaaaagagcatatttcagtcagttcacccaacactaaattcatcatttcagggggcccttgctcactgttgggtcctaattaatctaaacacacacacatacacacacacacacacacacacacacacacacacacacacacacacacacacacctgaatacctgcacaaatagcagtgttcaccaataggaagcagttgacaagggtactctttccatttaacccttcaggcccatgttgataaaactaacaattctgttcaaacttctgtatctaaacttttcataagcacatgacttcctgatggtttagttttggatatttaaaaaaaaaatttaaaaaaaaaaaactgtcttcccaactgtgagatgctgtttggatgtttcttgttgaagatgtttttattccaatatagcctctctcaatctcatagagcaacttaattattctcatggatggcaggtaattcagctgggtaattgcctactagaaggtggtaaaacctgagaaacagcaggaacaggagagggaagggaaaggacacgctgaattaccccttgctaataccttttctaccaaaataatctatatccatttgcttccctcgtacttttactttgtagagtagcttccatcaggaaagggaagagaacaccaaattagttctttgtctgactaaaattcaaagggcttcattttaaatcagagctgatgtttttattagtagcattttgacttgaaaatgttgatactattggcttgtaagaatgaaattaaacaagtttaatatgtgcattggtatgaacggtatgtgagcaaggaagagaggatgttaacaaggagtaatatactcaagcatttaaaagcaagaacaagggctacttcatttatttatgcagtaggtccttgtctttgagacaaaatatttggttagaaggcagctaaaaagaatgaatgtttcatttgttgaagatggaaaatgttgaaaatatgactgtcatagctagatatcttaaaataaaagccttataagtgtacattgtgtccccagcatcagtatttgattgttatttagtgtgaaatctgtttttttcttgaacaacattagctattaatcagtgcagtaacaaattacttgtacagaactttggtcttgttttggtgggacgcactgcttttgaacacgctggtatgcagcccaagtcttatttatataaaagcagagcataatctttcttgacaatttttcctttgacttgaaatgttatgtaacatttggccccgggaccaattggaattttcctttatctgtctattccatatattgcttgaggaatatatggggaagggcttgtgttggcacatactggccgtgctccaaccacagactatcagttctcttgtgtaatcacttactttctctatggaaagtattcctcaacatcttagacttctgttatattttatatgtgaccactaagattagggtctctccataaggtcggggacaagatatactcaaacttaaattcaattgaatattggttgacggtaaagtgcttcgaacccatgcaaatctgtgtaggttttttttttttttaaagtagatgaagtcattggaaaatttaggaaggctctctcaaatcttttctaataaagtcagatcacactaatatgcattaggaactagtgtacaccaggcccaaaagaaacttgcaaatttccacccagaatgtgctagccaacacattcacactaaaagctcagttagtgacttaatctgtattctctggaaatagactcctgcaggtcttcttcatgctctaaccatcagaactctctcatattttgacatcagcagaaacaactagtaaaatacagataagttgggtcccatccttagcttttctacatatacaattagcccaagaatttgcattactaacaagattgtggtgaccttgatagccttcaagtccgtgagacctcacacattttgtctgacctatcccaacacatttctgagttgtgttttcattgtgtcaccagaagcacattgccttcctctgttagtgaaaccgaggaggccctgacgcattttcaaaacactttgaaacagggaaactttcccacctctcaaaaaggcaggcaatgcagaagttgaaacattttcatggcagctgagaagtctgtcaaatttcttttctttttggagacactgagaattggaaccaggacctcatgcgtgctagaaaagcattctgctgtaagcttgtcctcagcctgcttctcatttccattttgagacagagtcttgtgaagttgcctgggctggccttgaacttgtgactctctggcttcagcctcttaagtagctgacagtacaggcctgtgccacctgtaaaacttatgtctcatttatactcattcatcatgagcatgtgttgaaacagtgactcataggaggacttacatttataggaattatgttgcttcatcttccaagtggcatttatgcatcacgtaaccaattatgcatgatagtttttatgattgattaggttattagtctctgctttatcatgggatatttttacccaggatgttttatattagttagcataaaattagacaacatattcaggtttttcaaaacctgtttagaattcttgaatttttgtgggttgctgagacagtaggtctcactgcatatccctgactaatctgttcatcctcctgcctccttcccatgagttcctgggattacaggaatgtattactatgcttcaccccactctggccactcttcctctcatggtcattttagaatgtaacagaaggacaatggaagtgacccaatgggcttgtattgaacttaagtggctgtcatttagaaaatatgcaagggagccagcattccatgataaccattactgtggtcttgagtaattccttccctgtgatggcatggacgggtgagtgttcattgtgtccttgcctgtgtacacatcttggaatgatacttgtcagtgtatcacgctattgttttggagaagacattttctcactaatctgggaactctgtaagatcaaggctgtttcgtgttcctgtcccttgtatcacagggccaggtacaaagaagtacacttttaaaatctggctgtatgagctaatcaggaaatgtattaggaagtgaagggaaaaaaatagacattagtgtaagcagaaaatgaaccacaggtcagggcttactgtccacttccaagcacatgctatatataatgtgaagctatgttggctctctcactactgtgattaactgagtacagaacagggttagtggaacccagtagactttcctgtcacaagtgagatgaatcatagctcttgtgctgttatttaccatgcttaaatccaggattcctcagaaaggattttaatcctctgcattgaacaatttatagaagacccccctccccccagtttttgagacctatccaggatatggtcgctgcaaacagtaagcttttgctttttatctctgccttgttactcaagcagaaaaaaaaaaaggactggtgttttaaaattgatttacaatagaactgaactgaagtaacctgacctgtggttatgaaattagcttcactacagcaataaaccatagatgctatatattttagccactgatggaagaaaggggcaatttttcccatttctatagtttccttgtaaaagaaaaaatgataaagattgatgtgaagtaataatgtccctgggtttcataacaccagctctttcttatagctatggagtagctttaaagtattcaaaatttacagttggcattattctctaatttctactttaaattcagaataagcaaaaaggcctacagcaactttaagagtctatccttacgttataaagattggctaataaaggtgaatcatgaagaggagaaatatttatagtatcttggtgtatattcagcatttcattaattccagtgtaaattagacaatttaaattgtgtgtgtaagaatgtatccatagactactagctgctatgacaaacagtgccagaactggcttctgttaaataataatagaagtcatgcatgaatgttcccagttggccaccttctttctaccttgtggttcagagtatcaggttcctttcatgctgtgggtcacatgacagagccacattggcaaactattaaaacatcatggtgcccctatgtgcttttttaaaaacaattaatatattctaatccttttaaataaaccattgttatcattcctgacttcctactcccttagtttctcttcctctacctccaagccaagtttctacttttgtgtactttctctattgtttcttttaattattatagttatatgactgtgcatatataaatatatcaacaaaacatgctgaatccatttagtgttactcatagatacttagggcagcccatttggtattggataacctaccatggtctcatccccagagaagactgattctccctctctcagcaataatgaattgcccataattcttcatttagcgactgggctttgtgagagttccagcatccatgttggcctgtctactagtgttgtcagtgctcaggccttgttttgactaacatattgttaatattttataggcgcagcttccctgttctatagagaaggcactgtctctcggtatatgccttggtcttctgacctcttttttgtgttccctaataatcaggcttgacaaccccagactcagttgttctcttcattttgaccatttgtggcgttctgtctgcttaaaaaaaaaaaaaagcgtcattgatgaaaggtgagagctacacttacctgtgcagtataaggatgactatgtaggttatagttaaaagctatattagcttaagaaagtgacagcagtagatattcctttcgagtctatgacttgatcagtcttgggtagttggctaggtttacattatcaggcctgaattctctcctactgagcaggtcttaattccactagacaagatataactgccactataacaccttcagggtatagtgccataatgattattattgtgtcatgtagatatcacagctaggtataagttttggcagtttttctccattggcagattgcatagcaccttctgtactatgaatgctagaccacaggaaggaggctttcaggtgagatccatctcacatcctgcaactcctatattcaaagtgtgtggtgtcttcaatagggacataacttcaaattctgataagttaacaaaatcaacaccaattgtccatattgctctgtgaggagatgtcttagacttctctgaccaaacctcaagaggaagtttctcatgtctagtactgaaacttctcatagaaagaattattcttactctcatgagaagaaaatccctagtgacatagcattgtgtgtgtgtgtgtgtgtgtgtgtttgtgtgtgtgtgcgcgtgtgtgtgtgtacttatatataatatggaattttaggtaaagataaaataaaaacttgagatgtatattaagaaaatatctaataaataaataaaaataaaaaagagataaaataaaacattttctatgaccttttcaaacatcttcagtattaatattcccttcccctttcagtaaattgcatcccttttctccccccagctaaaccctcccatgtttcctgctccctctccattgggtccacaacgtgctattccttcctctcaggcttctgctctatcccttcatcctcaccatctttctctctgctcttctggtgtctgccgctacttaagatttgcactcatatctgaaggttagcgctaggaaccacaaataagagcgaacatagagaatctggctttatgtatctgaaaaatacatatgtatttttacatgtttgtgttactactgtcaataaatgttattataaaaatttgcaaattaataataaaaaaatctttaaacagtgagaataaccagacccaaactctatacatctcaataaacttctcattagaattgtaaacatgttcctgggttaggcaattccagctagatgtagtagataccaaagaaaaatggtacaaattttcatagaggcccatcctggctggagaggccctgctgagtgagatagccatcttccagcttcataaacaaacacatacagatcattgcccagattgtctacaagttgtatatagacctgcctcgtgttttgtgtttttaatttataggccaatgctgaaaagtcagaattaatacaaaattcagtattattgtcttctcttttgaaaacaaaaagcaaacaagccacacttgggcatgcatttcactcgactataatccagtcaagaagaccaggtaactatcatgggctactcagacacgtcttctgtattcactgcaattcccacctagccctgcctcactcacagaccttcatgttgactctgttctagcttgctgaccatgagaagtcccatcatcatttttgacttcaccttgggtggagattttaggtccctggcggtcataggccttcaaatgcctaggaaaagagtacccagctccctttcaaatcaacttgtaaatggtcaaccctaaaccccagcaatgtaagcaggaggtataaacatcatgcttaggagtgactatatataattaggacacactcgctccctaagcaccaaaatcaattatccggataaaaccctaggacagcttaccactcttgaaatatacacttaggaaaaagaaaaaccaaaactaattttaggtgatcaagagaacactccttggggacaatctgagttcatcctaggacatgtgacagagcctgcctcttgttttctaaatgctcaggccaagtcaagacaacagtccttgctggggctgaggttgggctcttaccatgttgcctgggtcttaaaaagagccagcatcaaggcgtgcacagatgaagagactcttacttgagctggggaccacatgagggcaggtcccttctctgtgaaaagccttcatagaacccaagattcactggggatgttccactgagactccgcctatttgaacttgctgccttcactgtgtatagcggagacttgctctgaatgttgatccatgtaggaattaaattcagagagtgaatgtaatccttcctcttggtagaaaagcaatagaatttgctcaatctagaattagcctttgattagtgttttagtccttccaactttctaaggtcatcatagagtttgtgtgtttaaaaagtggatttcctctgtatttcctctcttcctgtccctctagagagcatacgtcatgatttgtaaacatgttcttgctcctcatagttaaataaggtgctacaagctagtgacaataactagtagtcagctgagcctttcatatggctttggtatatgtcaaaattccagctttaattttttggggggtgtctttatttgtagagaatacagcatctcaaggttgcacgctttatgttacatacatgaagtttgtcgtccttttttttttcttcttcaaaaagtgcatttataagggttcaaactcttcatgggatgtgactagagtcacatgcaaaaggaagatcctgattgtattcaaggtttcttagtgaaatggagctaaggattgggaaagaatcataaaagtctatcgtccaaaaaagctctctgcctctttcctggtcattttcaatatttcaaccaagaaatacaacaccatttctgcatagatcaaacagcttctatctcttgcgactttgtccaaaatctaattcacgacttcatgttatttctcagagtccagtgttagtatgttgttctccatgtaaagctctgagaacagtaagcacttgatgaattgtaattattgctatcattacattactataattctttttccgggcctgtgttttcttgtttattagcagtttgccggattgtttatactttgaaatacttttccttttcaactgtgtttttttttccttattccaggtttccatttgcttgcccttttatacagtccctggctctttacagaaattgtcaaattaaattagactcataatgccaaacagaagaacagccagcccagcaaataaccaggctctaaaaactgaagaattacgcagagagagtggaaagccagcgtcttctaaacaagacagatactgaaatgcccagtaaaggattagaaatagcctgggctgatggcacatggttaggaatcattattttccacgaaatcctactctgtgttacaaggcccagtgtcaggaagaataccaccttctccttccctagagttgcttttcagtgaaatattccctacttatcttaggaaagcaattttgaaatcctaggcactcaacaaaagcatattgaagtgatttgctagtcttcccttggcacatagctaccagggtctatagtaagggcttcatcaggaacaacaggcatgcagcctggatcaaaagacaggagtttagttaggtttaaatcgtgattcttttctaagtcacttaggcggtaaaagcttctgttcctttagttcatgaatgatgggattttttataataatgtactgaaattttattttacctccagattacaaattaattctcctaagctgccttcaaccacagcataagtcttcaaagatatagactggcgctttggcatttcaggaataatcataatgtcccgttaaacaaggttatctctggagtgtttagcagaattgaaattatttttcttactcatagtcatgtttattcttagctctaattgatgacagttaagtctaaagaaagcacccactgaaaaaaagaaaactcccaggcctcaataacagggccctgtaaacgaatagtatcctagagccaaaacaaaactcccaaggcctggaacttggaagagatcccaagttgagatgaagtagttttctgagtcctccatcactaccttaaattgtagtagaggttgctcctagatgttaaatggctaaaatatatatatatacatatatatacatatatatatatatatgtgtgtgtgtgtgtgtgtgtgtgtgtgtgtgtgtgtgtgtgtatgtattacacannnnnnnnnnnnnnnnnnnnnnnnnnnnnnnnnnnnnnnnnnnnnnnnnnnnnnnnnnnnnnnnnnnnnnnnnnnnnnnnnnnnnnnnnnnnnnnnnnnnnnnnnnnnnnnnnnnnnnnnnnnncaccttatttattaaacatggtaaacaactcattctatgtcacaactatagagcttttgagaaaagtcatgaaagtcattaggaaatgcaattaacaatgctgtttcaaagacaccaatctgtctagtattcaagaacagtcatttaactcacaacgttgtaagagttagctcctggtgactgagcttagctagctcagtgcattacaggtcaggtaggtgtcaacatggcctttgtgtggatttgctttgcacatctgggtatctgaagttgtgcagtcagtcaatctaggctgtgtcccaccttctaccatatatgaggatatggcaaaagagctataataaaagctaaatgaggctttctccatgtttcttcatggtctatattactgataacatatgattggttaaaacaaatcacatagccttcatattgaaagacatgcaaaaatacatactatgcctttaatatgaggaacttagctatagtcaaaggttataagaacaacgatgagtgaaaatgccctggccagtcatccagtctgtctggcacagaagagaactgactggattgtggtgctcccttgccaccagtgagccctatattcttagaaaccactaactactttgggccacaggtttgcacttagtaaaacgaaagggtttgactatataattgcaaaagtccctttccaagactttgaaatcttgtaggatttgactgcataattgctaacattcctttccaaggtttctacagtaatctctaggtgcctgtgagataagtgcaaaagaaaatttgaaaagcatatcaaagctccgaagtctaaagcatgggttgtgttaaaaaaaatagtgagagtactgtctatggaggggtgtgttcagatggcggcagtgaagaaggaatggaggcagaagtgagaggaaaaggaaccagaactcacttgtgcttttcatcagatgaagagtaaatttcctctgttacttaaagaagagtgcacacataggagctatgtcaggatgcaaaggcaggttagggaccacattggggaaaaaatcacatgatgtccatattctgttttctttcttttattcacttaatatctacatcaggctccgtctaccttatcctttgatcctcatatttccttcctgtgcatttagcatcctctattctgccccctaccctgtgtttccagtgactgctctgaaaccaaccctaaggtccagaagtctataatggagagatttaccagaaagaaatctttctgattgtgtgtgtgtgtgtgtgtgtgtgtgtgtgtgtgtgtgtgtgtgtgtacatatacttatttacatattccagcaatagtgtggaagagggagagaattcaacaggagaaaagtgcctgaataccactgtcaaaactgatgttacacaaagtgtcatcagaccagcaacatctgcatcatctgagagctggtcagaaatgaaattttacaccacccttcatagatctagtgtttcttagcccaaacctgacaaaccctagttcttttgtttctatattaactttagggaagcgataaagcttgctgagagtctctttacatagcattatttttttaaaagattcagcctcaactacagaatatgtacagctcattatagatctatagctgattctgtatgaaggaaaaagaccaaggttgcatttttatatattacagcaaacttaaagcctaaaaatcagctatttgtatacacatgacatgcctttaggtggagcactaaaaagggaatctaagctagagaactgtcagtctaggaaatgccatgtattatttgttctacaggaaaggaagcacgttgtgagattccacccctggatataataatgtcacagatactgtgagactcaaattttagctctaaaatcctcaaaagaatatttccagggtcactttaaggtcacaatctaggcttcattgccaacccatacatcctatcctggtctgtgccatcccttccatccaacatcatatatatgtgtatatatatatatgtgtgtatatatatatatatatgtaaactttcttatctcgaaaagattctgagttctttctaccacatggtatcaaaccattgaaaatattacttattgataaatgtatcaaaatcaacagtaaaccagaatctagcccaaaaggtaaaatttaggaagaatcatgatcacatttcattgaccaagtagccactcaagacggggccacttagcaggcagggtaccaaatgtgtttgtgtacaaatcctgttctttatctcctttcggaaataagagtcaacactgattcgtcactaagcaatcacaagatgccatacatagtctcatttaaaccctttagcaggacccagaggaaatcagtatagtaatcctccttgtattttgagacaattgaagagtccgggagatgacgtgtgagtaaaagcattgcttcacaagattgatgacctgagttcaatccccagaacccagagtggaagagataagatacatgcatgttctaacataataaataaaattaaaattgaagacaattgaaactccaatagattaaatgagttttccaaggtcagtgttatctaacggacacacttgataccagtttagttaagagtcttatctagccccggaattatcctccttgtgtgaatctctggcaacaggtaattcatggtttccttgtagaccctttacaataagcgctattgctagctaatgtttgcttatgagatgaaagctaattaattttattgtttatagcaaatgtaattacttgggaaaatctggcaaaaaataagtgtgctgtgctcatccccctgatagaaacacttggctttatcttgtgaattcactgcactctccaacatgggcatgaaatgtcagttttgtttctttttccttcttcttaaacccagaagtcttttattcttctgatttatttatttcatatcccaagtatttcctgtttgacctagaaacgcactgatcatcactttgctccttctttaagttttctgttgccaatggcaaccttgagttacaaggtccaacataaacagagtttccctaggcatgtctgtgactttgaacttcacttcatggtcactggtacctgcttgtctgtttggctcactcctggcctgtgttatgagggactccaatgtgcctgaatttgactcttcagtgctaagccctcacaggtaacaacagttgctgaacggttagtttgtgcttcaatttactgacactgtattccttattcacatcagtaatttgaattagaagctctacttgtttgttttttattattgattctgatttccaaatctcttggcaaatgtatgtcctccatagaccctatgaatcattttacctttgcctatacttgttttaataattctcatctgtatggtagagatctttgaccttacacagcacttctcacccattctggcccaacacagaagcctggtcctgcagaatggagattctcctatgctacccatggagcctcctcctgtggagggcttttcttattttcatgatttaggggggtttctatattcaaacctagctagaaatttcagcaaagatcattgtcgttttatttagtgtttctcagtgtttagataaaaaatgcatttctcatgtatccgtccatattgattcaaagtctcatggaaacttagtcttacaaaacctagaagaaaacacatttaaaaaaaaaaaaccagagtgatgaggatacaaagtagaatctgcttttcccacatggtactttttgaatgatcctcaggtaacctgactggcctcgctctgtacttttctaaaaattcatgaacttattctaaatataagacaggaccttacaaggtagtttaggctaaatctgaaactacccattctgtgaatatattttaggaagggtgtgtgtgttgttttgaatatccatttatctaactgatgaagtttaagccagagaactatattctctgcaatggtcattgattataccacacaacctgagttttgcctttttctatttattttttaaaacggatattagattttgttttcattttagaaatacacttttgtgccaaaaataatataatcacattgccctgaaagtgggaagtagaagaaatgaaaatactcaagatccccacatagttcatgttctcgtatttcctttgaacagagctctcggtttttatatttttctcatatttacagaagatgtatacaagtctaagtgtactttacagttattgtaacagtcatgacacattccataccacccctgtttctctgcttccagatccatttatttatttacacttatttgcatatatcatatgttgctaaatagaatcctttcacagaaatacttgtgtttggatgatttttagtttctaggctaatttgttttactattttcccttatctttagtaataaatttcaaaatattttatgcaaaatactaaatataactacctcccaaacaaacaaaaagaaacaatataatgtaagagggttaaaaggggactggagagagggcttaacagttaaaggcactgactagtcttccacaggaccctgattcaattcccagcacccacacagcaacttgctgtctctaactccaagatctgacaccttcacacagacatacatgtagacaaaacaccaatgcacataaagtataattatggggatagatagatagatagatagatagatagatagattatcaggaaaagaattttaactatatatggtagctactactggcaaaaaaagagagagagagaataaactaacctaaaatatataatgagaacaaactacctgtgaattcttcaaagacatcacaagtacaggaagaatataattattttagacaaactttaacagggaactattcttagccaaaaatattctgggaattaaaagaatcttgtaaaaattggaatgctaccttgttatttcaatgatcataatattgaaactttcttcataattgacataaagtatgaatgtcaatacaataatacaatcatgtcttagttaaggttttactgctgtgaacaggtaccatgaccaaggcaagtcttataaaagacaacatttagttggggctggcttacaggatcagaggttcagtccattatcatcaaggtgagagcaggcagcatccaggcaggcatgttgtaagcatagctgagagttctacatcttcatatgaaggctgcttttggaagactggcttccaggctgctaggattagggtcttaaaggccacttccacagtgacacacctactccaacaaggcctaatcttctaatagtgccactccttgggctgagcatatacaaaccatcacgaatcagaaggcaaactttccagtgtaagaaaaaaatgattaagttaggcagaaactatatgtaatgttgtatttaaaattgatgtgtgacatggtggtgtgcacttgctatgccagcacttaggaatctgaagcaacagaaagaatgtgggttcaagagccatctggttgacatagtgagttccaatcctacttggactacagggcatgactctgtctcaaaagtaaagcaaacaaaatcatttgaaatagcagtatataccaataacttttcaaagtatatttctttgccatactgtgaggcagcctgtgcttgttgattgaaagcagcaagcacttctgggttccggggctgggcttattaaagctttcatgggagggaccagagcttcctcagaaatcagcttcttctggttttgatacagggaccattcagaagtgtctggacatctggtacacacacacacacacacacacacacacacacacacacacacacacacacacacatacacacacacaccactactccctccctcccctttcccccttcaagcaattaaatactcaaaaattgaaaaggacactctaacaaatctcagagccagcctgaaagggccccctcagccacacaccagacatgtgagctttgctatgaacaaacggaaagcacaaaactgttagaactgattaaaatccaaggaataagtaagaattgtctgcatttatttggggaaagagaaacggggggggggtgacaagaaggaggagaaagaggagcagaaggaattatgtaactataaaaatttttttactctcaccatttcttattcagaaaatttgtaattaaagaaaaagagggaaacctttaacttttgctctgccttcagggagaactttagtccagggtgaaggttgttagtagacacagatggctgctttgctttttgagacagggttttgctgtttattacagaaagagtaccatctaaatctaaaattgttacaaatcaccgtctacctccaatgaagagtaaagaattactagttatataagaagttatggaggaaacttcatacagatttgtaatttgacctcacagtgtaactgactattggaaggagaaaaaaaaacaaaaaacaaaaaacaaaaaaaaaaaaaaaacaaaaacagatctttgcaaatcaaaggggcagcagttaccaagctatctctaagaacattcaatgttgatagtaaaaccggctgatttcgacacctacaaacatatagccccaggagttagaaacaaatgcctgctgaacattcctgccaaatcaaatgtttaagttccatataatgaaatctatagttaccttctagttttcaagagccaacttaaatggcattgcaagctactagccacacaatctcagaatgtgtgtgttcagttaaaaaaaagacagtgatcaatacctgaaataggaaaggtgagaaagatataacaaaaaataatacaattaataattgttactattttcctgaaactgattaagatactgccattatgttaagaaaatatccttatttccaggtgacatgtgttcatgtctaaacaatttcaaatggttccgcagatacttagaataatagaaaatgcaagttttagaaaaaaaagtaaaaatgtaagattatttacggatatcgacactcagctatgtttccattaccatcatggctcatttattttgcctctgcagtcaacatcataatgcttcaagcatccttagccatacgcctataagccagattccagaaggtagacttacccaatcaaaggctatgtatgttgtccttttctttctttgctttttgttaatttggttttgccttaaactactttggggtttcttttttaatataaagaggtacttgtaacacacaataagtgtaagtaaaaggctgtctcctggggacacaggggcagctttgggcagtcaggcctttatctcatatccagactgatcttggactcattcccaggtgaccctctggctccgttctgaaaagccaagactacagccccagcttctgccgcagcacacagttaatgctgtctgcctggcacgtactcatgctgggttcagacctcgtggagcctagtaagctaacagcttctcaaacagaacactggagaaaccagtttctgaggatctgcccagcttcacttagaggtcatttgtagcacaaaaatctataggaagcagagaaagggctttccacttgatgatgtgggatgaagtgaagatggtagcagtgtctgtcacctcactcgcctacatcccaatcatgtctaaggcagggagtccaaacctttccgtcttcagattaacgcagaatataagtgagaggaaactacgtggtgtgggcttcggggtccattctgtcttcagatgtgacaaagcagtgagtgtcctcacatctcatcgccacacttgaacccagccgtaaggatcgggcacctgctacagggaggccagcccctgaaggggacaccaggggaaagcacactttctgctgggtgggcacacctgttttcctatctacagctagtaccagattatggcccagtgtcagacaatgttgtcggactgacaattattattttgtctgactgctgacagtaaaaagtcagaaattcctgcatgaaaattttcaatttctgggttttgttgctgctattgtttgtttgtttgttttatttttgttttcttggaaaaccagcatctaagaagcctgagccagaacctagctaatgacaccacctttagttggatcacatcttccctagtcccacccctcctcctctgtcttacacagcatgcttttcaaactaacctgactttctcagccatgtaatcaaaagtgcttgagccataccagctctagttggatggggctttccgggaatggctccaggaattcatctgtataatatatatatatgtatatacatatatatattatttttttacaaggaacaaatcactagtttataagaaaactaaaagaaaattttctaacttgacatctaatagtaaatacaatttttaaattgacttattaataattgaatgatgtttctaaagaatagcatatatgacatttcatctcaactgttaggcagtgacctagtttagaatgcaatagaaatctgcttctacctcaagataagaagaaaagtccaggatagttatgacttagccacaattaggtcaatgattacaaactgttaagcatcattattaaaattaaattatcaaaattaagtctttacaggaatcaaattaccaacatccctaaaaagtgttggctgattgtttggcatttcctcatatttctttttcttttcaaaaatgaggatgatgacgattatgataatgaatcattctgaaattgcatagtgtcttatacaacatcttaggagagactgtttgctaggtcaggtccaatacacccgtagttgaagatccacccatcaaacctaaataaaaacagccatcttctgcggccacagtgctgctcttcctttccttaggttacttggaactgaaactaatcacaagtgtgctggattgaaggctgtgagcggatagaggcagttgctgggaatccagacctgtcatctgggttggaatcactctagcaaactgagcaaaccatgctttcttctgaattttttggggcagcgtggggaatgaaaggaaagttctttcttgtctgactctgaagtgatttttttttttgagccaaagaatatgaggccatgttcatgatgtccttgctccatcgtaatccagtatccagtgcattttgggggcagtgggctctcctctctattgatccaatagaagtcttgtgttctctctctctctctctcctctctctctctctctctctctctctctctctctctctctctctcatatattttttgttgtattttctttgagaagggagaaagttgatttctgaatacccagactgaaccctttcccccacactcaacttgatatatgctatgtggggagaggtctttcagcaagatccagaatttactgtctgctatcattccagtccactgatttttagaaactgtaacaatttttctttggaaaggaaatgcattgtgtataccatgccatgcttcaggaaggcctggtttgtactctacagaaattaacctttctgcaatacagcgcagaggggagagcactggaaggagagaccacacaaggaccacaaataactgttattcttgctgagtttgtcatagatttaccgcaactttctgtatttcaaaacttcgagagtttcagagttgcagagttttagagagttttagagttgtatcacatcgatgcagagacgaaataactaagacttgacagaatatctctgacctaactaaagagagagtgaatgagttgagctactagatgctgccaaatggctaacaatgtccagaaaagaggttcagactcaccaaggcagtagcccttaggactgacttcacagtagaaagccccagagtcaaggccaagcctgagagggttcacctgtggttgcagatggaggatacacagccaggatatggccaaagtggaactggagccttaaaaagataatcagcataggtaatgagagctggctagcagtattgccatcgcgcagcggagaatgcagaggctaggcccaccctcacctcccaagcgagagtcgaggccaagccacacagtctgttcacatctgagggcagacaaacaccaaaaccattttcaggtcttaagaactctccaggttcctttgtccatattttgtattttaaaattcaatgtgcagctcaggctagccttttaccaatggtgatcctcctgcctcacccacccaggtgctatctaaaggagttgcctcaaggataataaaaggcaacaaaggaccattgtcttcaggatattttaaaatgtggagtttcctttgggctcagaccacaggggcttcttgtaagcagctccgaacaccctcaccattgtgtgagaaagcgctttacagcctctttatagctaaggcaactgtgtcagtctgtatgtgaagaggtcctcgatattaaaaagggcttgcaaatttccaaggcataaaacaggtcaaatagaagacatttaaaaggtaactgtagcactttaaaagacaaataaaaatggtggcgagaaagacgaaataaggaagtgatttgaaaaagaactcacagcaaaagtttgtgcatgagcagggttcatatgaaaataacacaccaagcttctcgggaaagcaacagttctcaacctgtgggtcccaaacccattgatgatcaaacaaccttttcacagggtggtatatcagatgtcctgtgtatcagatatttacattataattcataacagtagcaaaattacagtcatgatgtcacaatggaatagttttgtgtgatcaactgtgttaaacagtgttggcataaggaaggttgagaaccactgttttaaaggcaccagtggacttgtggcattgaccatgcagcgggtcctgtggaaaaccaaaatactaactgaataaacaaactagaagcactcagtcttagtttcccagcctcaaagctgaaaccctgctgttgacactactcaatccctgagcataagaatttcaatcattatatacttcttctgtaaacttttccaagggtgtgtgagtgtgtttagagttcagtttattcgtcttcgtccaagtccttaggcttgttacactacatgaccacaacttgattttcagctgggaacgaatggtatgtcctactaaactgttactcacccgtactgtggctgaccggtgagtggcatcctaagtccatttatccttactgtgtgtgccctttacacatcattgggaaggagtgtctgtatgggtgagttgagaaatataaatggcctcaaccttttttcctctcttgatgtctctcagctgcagacggagctggagcaagaataccaagacaagttcaaaaggctgcccctggagattctggagtttgtacaggaagccatgaaagggaagatcagcgaggacagcaatcacggctctgcccctccctctctggcctcagatgctgcaaaggtgaacctcaagtctccctccagtgaggagatagaaagagagaacccaggaagagagtttgatactcctctgtgatgcccctgtcaggccttccagacatgcacagctgcttgagctccagtggactctaatgacaaatatcactgcctgggccatcttcctgagaaatatcccttagcctgaaatccacaccaaagggagacttccagaaggatcc

SEQ ID NO: 457 - DNA, 4263 bp, Mus Musculus
gtgcacagaggatgtgctgaatggtgcgcttccaggcggcggccgagcaggatccagcggcgggcgactcgcactgcccggctctgctcctccgcgtctcccgaggctctacagtcaccgcgggctccagatcctgcgtcccgcccggggcatggcaggctgctgtaccctcgcgtgtcgtcccgcttactaagcggcgcgggccagaggtgcggaggccaagaggccggaggccggcgggcagcgaagcccagagcctggtgaatcgagagccaagcccgctcgcgcccggagctccgcgtcccgtctccactgcgctcgcccgggccgcccggagccccgatgagcccagatggctggggctcagcccggagtgcacgccttgcaactcaagcccgtgtgcgtgtccgacagcctcaagaagggcaccaaattcgtcaagtgggatgatgactccactattgttactccaattattttgaggactgatcctcagggatttttcttttactggacagaccagaataaggagacggagctgttagatctcagccttgtcaaggatgccaggtgtgggaagcacgccaaagctcccaaggaccccaagttgcgtgaacttctggatgttgggaacatcggacacttggaacagcgcatgataactgtggtgtatggaccagacctggtgaacatttcccacttgaatcttgtggcttttcaagaggaagtagccaaggaatggacaaatgaggttttcagcttggcaacaaacctgctggctcagaacatgtccagggacgcatttctggagaaagcatatactaagctcaagctccaggtcaccccagaaggccgcattcctcttaaaaacatctatcgattgttctcagcagaccggaagcgcgttgaaactgcactagaggcttgtagtcttccatcttcgaggaatgactccattccccaagaggacttcactccagatgtatacagagttttcctgaacaatctctgtccccgacctgaaattgataacatcttttctgaatttggtgccaaaagcaaaccgtacctgacggttgatcagatgatggattttatcaaccttaagcagagagatccccggctcaatgaaatcctttacccacctctgaagcaggagcaggtccaagtgttgattgagaaatatgagcccaacagcagcctcgccaagaaagggcagatgtcagtggatggattcatgcgctacctgagcggagaagaaaatggagtcgtttcacctgagaaactggatttgaacgaagacatgtctcagcccctgtctcactatttcatcaattcctcgcacaacacctacctcacagctggccagttggctgggaactcgtctgtagagatgtatcgccaggtgcttctgtctggatgtcgctgtgtggagctggactgctggaagggaaggaccgctgaggaagagcctgtcattacccatggattcaccatgacaacagaaatatccttcaaggaagtcatagaagccatcgcagagtgtgcgttcaagacgtctcctttccccatcctcctttcctttgagaaccacgtggattccccgaagcaacaagccaagatggccgagtattgccgattaatctttggtgatgccctcctgatggaaccactggaaaaatacccactggaatctggggtacctcttccaagccctatggatttaatgtataaaatcttggtgaaaaacaagaagaagtcgcacaagtcgtcagagggaagtggtaagaagaagctttcagagcaagcttccaacacctacagcgactcctccagtgtgttcgagccttcgtctccaggagctggggaagcagatacggagagtgatgacgatgacgacgacgatgactgtaaaaagtcttccatggatgaggggacagctggcagcgaagccatggccacagaagagatgtctaacctggtgaactatattcagcctgtcaagtttgagtcctttgaaatttcaaaaaaaagaaataaaagctttgaaatgtcttccttcgtggaaaccaaaggacttgaacaacttacaaagtctccggtggaatttgtagaatacaacaagatgcaacttagcaggatatatcccaagggaacacgtgtggattcatccaactacatgcctcaactcttctggaatgctggctgtcagatggtggcgctcaacttccagacagtggatctagctatgcagataaacatgggcatgtatgagtacaatgggaagagcggctataggctgaagccagagttcatgaggaggccggacaagcattttgatccatttactgaaggaatcgtagatgggatagtggccaacactctatctgttaagattatttcaggtcagttcctctctgataagaaagttgggacttatgtggaagtggatatgtttggcttgcctgtggacacaaggaggaaggcatttaaaaccaagacatcccaaggaaatgctgtaaaccctgtctgggaagaagaacctattgtattcaaaaaggtagttctaccttctctggcctgtttgaggatagcagcatatgaagagggaggcaaatttattggccaccggatattgcctgtgcaggctattcggccaggctatcactacatctgcctgcggaatgagaggaaccagcccctgacgctgccagctgtctttgtctacatagaagtcaaagattatgtgccagacacgtatgcagatgtaatcgaagctctatcaaacccaatccgatatgtcaatctgatggaacagagagctaagcagctggctgcgttgaccctggaggatgaagaggaagtaaagaaggaggctgaccctggagaaacatcttccgaggctccaagcgaaaccaggacaacgccagcagagaatggggtgaatcacaccgcatcccttgcacccaagccgccttcccaggctccacacagccagcctgctccagggtctgtgaaggcacctgccaaaacagaagatctgatccagagcgtgttaacagaagtagaggcgcaaaccatcgaagagctcaagcaacagaaatcgttcgtgaaacttcaaaagaaacactacaaagaaatgaaagacctggtgaagagacaccacaagaaaaccacggagctcattaaggagcacacgaccaagtacaacgagattcagaatgactacctgagaaggagggcagccttggagaagtccgccaaaaaggacagcaagaagaaatctgaacccagcagccctgaccacggctcatcagccattgagcaagacctcgctgccctggatgcagaaatgactcagaagttgatagacttgaaagacaagcaacaacagcagctgcttaatcttcggcaagagcagtattacagcgagaagtaccaaaagcgagaacacattaaactgcttattcagaagttgacagatgttgcagaagagtgtcagaacaatcagttaaagaagctgaaggaaatctgcgagaaagagaagaaggaattaaagaagaaaatggataagaagaggcaagagaagataacagaagccaagtccaaagacaaaagccagatggaagaggagaagacagagatgatccgatcgtacatccaggaggtggttcagtacatcaagaggttagaggaagcacaaagtaaaagacaagaaaaactcgtggagaaacacaatgagatccgccagcagatcctcgatgagaagcccaagggggaaggcccctcctcagtcttgtcggaaggttgccatgaggatccctctgttccccccaactttactccccccaaccctcaagctctcaagtggtgagcaccgtccttctagccagctgcagacggagctggagcaagaataccaagacaagttcaaaaggctgcccctggagattctggagtttgtacaggaagccatgaaagggaagatcagcgaggacagcaatcacggctctgcccctccctctctggcctcagatgctgcaaaggtgaacctcaagtctccctccagtgaggagatagaaagagagaacccaggaagagagtttgatactcctctgtgatgcccctgtcaggccttccagacatgcacagctgcttgagctccagtggactctaatgacaaatatcactgcctgggccatcttcctgagaaatatcccttagcctgaaatccacaccaaagggagacttccagaaggatcc

SEQ ID NO: 458 - protein, 1173 aa, Mus Musculus
MAGAQPGVHALQLKPVCVSDSLKKGTKFVKWDDDSTIVTPIILRTDPQGFFFYWTDQNKETELLDLSLVKDARCGKHAKAPKDPKLRELLDVGNIGHLEQRMITVVYGPDLVNISHLNLVAFQEEVAKEWTNEVFSLATNLLAQNMSRDAFLEKAYTKLKLQVTPEGRIPLKNIYRLFSADRKRVETALEACSLPSSRNDSIPQEDFTPDVYRVFLNNLCPRPEIDNIFSEFGAKSKPYLTVDQMMDFINLKQRDPRLNEILYPPLKQEQVQVLIEKYEPNSSLAKKGQMSVDGFMRYLSGEENGVVSPEKLDLNEDMSQPLSHYFINSSHNTYLTAGQLAGNSSVEMYRQVLLSGCRCVELDCWKGRTAEEEPVITHGFTMTTEISFKEVIEAIAECAFKTSPFPILLSFENHVDSPKQQAKMAEYCRLIFGDALLMEPLEKYPLESGVPLPSPMDLMYKILVKNKKKSHKSSEGSGKKKLSEQASNTYSDSSSVFEPSSPGAGEADTESDDDDDDDDCKKSSMDEGTAGSEAMATEEMSNLVNYIQPVKFESFEISKKRNKSFEMSSFVETKGLEQLTKSPVEFVEYNKMQLSRIYPKGTRVDSSNYMPQLFWNAGCQMVALNFQTVDLAMQINMGMYEYNGKSGYRLKPEFMRRPDKHFDPFTEGIVDGIVANTLSVKIISGQFLSDKKVGTYVEVDMFGLPVDTRRKAFKTKTSQGNAVNPVWEEEPIVFKKVVLPSLACLRIAAYEEGGKFIGHRILPVQAIRPGYHYICLRNERNQPLTLPAVFVYIEVKDYVPDTYADVIEALSNPIRYVNLMEQRAKQLAALTLEDEEEVKKEADPGETSSEAPSETRTTPAENGVNHTASLAPKPPSQAPHSQPAPGSVKAPAKTEDLIQSVLTEVEAQTIEELKQQKSFVKLQKKHYKEMKDLVKRHHKKTTELIKEHTTKYNEIQNDYLRRRAALEKSAKKDSKKKSEPSSPDHGSSAIEQDLAALDAEMTQKLIDLKDKQQQQLLNLRQEQYYSEKYQKREHIKLLIQKLTDVAEECQNNQLKKLKEICEKEKKELKKKMDKKRQEKITEAKSKDKSQMEEEKTEMIRSYIQEVVQYIKRLEEAQSKRQEKLVEKHNEIRQQILDEKPKGEGPSSVLSEGCHEDPSVPPNFTPPNPQALKW
